(19) United States
(12) Patent Application Publication
(10) Pub. No.: US 2025/0179196 A1
(43) Pub. Date: Jun. 5, 2025

(54) MATERIALS AND METHODS OF MAKING OR USING IL-23R BINDING PROTEINS

(71) Applicant: Janssen Biotech, Inc., Horsham, PA (US)

(72) Inventors: Qiang Chen, San Diego, CA (US); Ellen Chi, Del Mar, CA (US); Wilson Edwards, Cardiff, CA (US); Carrie N. Greving, San Marcos, CA (US); Ann LaCombe, San Diego, CA (US); Xinyi Li, San Diego, CA (US); Wai Lin, San Diego, CA (US)

(21) Appl. No.: 18/293,215

(22) PCT Filed: Aug. 1, 2022
(86) PCT No.: PCT/US2022/039044

§ 371 Date: Jan. 29, 2024

Related U.S. Application Data
(60) Provisional application No. 63/227,976, filed on Jul. 30, 2021.

(30) Foreign Application Priority Data
Jul. 29, 2022 (TW) 111128678

(51) Int. Cl. C07K 16/28

(52) U.S. Cl. CPC C07K 16/2866; C07K 2317/33; C07K 2317/92

(57) ABSTRACT

The present invention relates to monoclonal anti-interleukin-23 receptor (IL-23R) antibodies, nucleic acids and expression vectors encoding the antibodies, recombinant cells containing the vectors, and corresponding compositions and methods of making and using antibodies respectively, i.e., e.g., detecting, selecting, enriching, inhibiting, or antagonizing IL-23R or treat an autoimmune or inflammatory diseases or disorders.

### CROSS-REFERENCE TO RELATED APPLICATION

[0001] This application is a 371 national of PCT/US2022/039044 filed on Aug. 1, 2022, pending, which claims the benefit under 35 U.S.C. § 119 of U.S. Provisional Application No. 63/227,976, filed Jul. 30, 2021.

### INCORPORATION OF SEQUENCE LISTING

[0002] The sequence listing in ST.26 XML format entitled 2948-32-WO-ST26.xml, created on Jul. 28, 2022, comprising 2,022,624 bytes, prepared according to 37 CFR 1.822 to 1.824, submitted concurrently with the filing of this application, is incorporated herein by reference in its entirety.

### FIELD OF THE INVENTION

[0003] The present invention relates to monoclonal anti-interleukin-23 receptor (IL-23R) antibodies, nucleic acids and expression vectors encoding the antibodies, recombinant cells containing the vectors, and corresponding compositions and methods of making and using antibodiesrespectively, i.e., e.g., for detecting, selecting, enriching, inhibiting, or antagonizing IL-23R or treat a autoimmune, inflammatory diseases or disorders.

### BACKGROUND

[0004] IL-23 is a disulfide-linked heterodimer of the IL-23p19 and IL-12/23p40 subunits. The receptor for IL-23 comprises the IL-23R and IL-12RP1 subunits. IL-23p19 binding to the N-terminal immunoglobulin (Ig)-like domain of IL-23R is followed by IL-12/23p40 binding to IL-12RP1 (Bloch, Y. et al., Immunity 48: 45-58 e6, 2018). Ligand binding results in the phosphorylation of JAK2 and TYK2 followed by phosphorylation and nuclear translocation of STAT proteins. Although multiple STAT proteins are phosphorylated in response to IL-23, STAT3 is thought to play a predominant role in mediating IL-23 signaling (Parham, C. et al., J Immunol 168: 5699-708, 2002).

[0005] The IL-23 pathway has been validated as a key driver in multiple inflammatory diseases through highly effective antibody therapeutics that block IL-23 signaling (reviewed by Gaffen et al., Nat Rev Immunol 14: 585-600, 2014). IL-23 and IL-23R protein are expressed at low levels in vivo, and using currently available IL-23R detection reagents, increased IL-23R expression is not always detectable in diseases, even in those diseases where IL-23 blockade is highly efficacious. To date, there are no commercially available anti-IL-23R antibodies validated for the detection of IL-23-responsive cells in healthy individuals and disease patients or for studies of IL-23R regulation, trafficking, and turn-over at the cellular level. This is well-recognized as a major challenge to research in the field by academic and pharmaceutical industry scientists. Thus, there is a need in the art for improved anti-IL-23R antibodies for use in receptor detection and other purposes, including in applications to and methods for disease detection, management and treatment.

### SUMMARY

[0006] In general, the present invention relates to monoclonal anti-interleukin-23 receptor (IL-23R) antibodies, nucleic acids and expression vectors encoding the antibodies, recombinant cells containing the vectors, and corresponding compositions and methods of making and using antibodies respectively, i.e., e.g., for detecting, selecting, enriching, inhibiting, or antagonizing IL-23R or treating autoimmune, inflammatory diseases or disorders.

[0007] In a general aspect, the invention provides novel interleukin-23 receptor (IL-23R) antibodies directed against IL-23R, particularly human IL-23R. In an aspect, provided herein are isolated antibodies, particularly an antibody or fragment thereof, including an Fab fragment, a single chain or domain antibody, which specifically recognizes IL-23R. In an aspect, provided herein are antodies or antigen binding fragments thereof, wherein the antigen binding fragment is capable of binding to or recognizing IL-23R, particularly human IL-23R.

[0008] In an aspect, the antibody or antigen binding fragment thereof binds to or specifically recognizes extracellular domain (ECD) of IL-23R. In an aspect, the antibody or antigen binding fragment thereof binds human interleukin-23 receptor (IL-23R) on a mammalian cell. In an aspect, the antibody or antigen binding fragment thereof binds human interleukin-23 receptor (IL-23R) on human immune cells. In an aspect, the antibody or antigen binding fragment thereof binds human interleukin-23 receptor (IL-23R) on primary human immune cells. In an aspect, the antibody or antigen binding fragment thereof binds human interleukin-23 receptor (IL-23R) on the surface of cells including primary human immune cells. In an aspect, the antibody or antigen binding fragment thereof binds human interleukin-23 receptor (IL-23R) on T cells. In one aspect, the antibody or antigen binding fragment thereof binds to or specifically recognizes human IL-23R and also rat IL-23R. In one aspect, the antibody or antigen binding fragment thereof binds to or specifically recognizes human IL-23R ECD and also rat IL-23R ECD.

[0009] In some embodiments, the antibody or antigen binding fragment thereof binds human interleukin-23 receptor (IL-23R) on a mammalian cell. In embodiments, the antibody that binds IL23R on the surface of cells including primary immune cells comprises or is selected from antibody designated herein as I23RB1, I23RB102, I23RB148, I23RB155, I23RB156, I23RB157, I23RB160, 123RB162, I23RB165, 123RB166, 123RB173, I23RB2, I23RB27, I23RB270, I23RB3, I23RB30, I23RB318, I23RB32, I23RB33, I23RB36, I23RB39, I23RB4, I23RB42, I23RB45, I23RB47, I23RB58, I23RB65, I23RB7, I23RB71, I23RB73, I23RB74, I23RB76, I23RB77, I23RB81, I23RB82, I23RB86, I23RB92, I23RB93 or I23RB94. In an embodiment, the mammalian cell is a human cell or a rat cell. In an embodiment, the cell is an immune cell. In an embodiment, the cell is a primary immune cell. In an embodiment, the cell is a human primary immune cell or a rat primary immune cell. In an embodiment, the cell is a human T cell or a rat T cell. In embodiments, the cell(s) may be or may include include αβ T cells, including CD4+ and CD8+ T cells, γδ T cells, natural killer (NK) cells, innate lymphoid cells (ILCs), or monocyte-derived macrophages. In embodiments, the cell(s) may be or may include include αβ T cells, including CD4+ and CD8+ T cells, or γδ T cells. In some embodiments, the cell is a natural killer (NK) cell. In some embodiments, the cell is an innate lymphoid cell (ILC). In some embodiments, the cell is a monocyte-derived macrophage.

[0010] In an embodiment, an isolated monoclonal antibody or active fragment thereof is provided that binds human interleukin-23 receptor (IL-23R) on a mammalian cell, wherein the antibody or fragment comprises:
[0011] a. an HCDR1, an HCDR2, and an HCDR3 as set forth in SEQ ID NO:236, and an LCDR1, an LCDR2, and an LCDR3 as set forth in SEQ ID NO:237;
[0012] b. an HCDR1, an HCDR2, and an HCDR3 as set forth in SEQ ID NO:798, and an LCDR1, an LCDR2, and an LCDR3 as set forth in SEQ ID NO:799;
[0013] c. an HCDR1, an HCDR2, and an HCDR3 as set forth in SEQ ID NO:792, and an LCDR1, an LCDR2, and an LCDR3 as set forth in SEQ ID NO:793;
[0014] d. an HCDR1, an HCDR2, and an HCDR3 as set forth in SEQ ID NO:786, and an LCDR1, an LCDR2, and an LCDR3 as set forth in SEQ ID NO:787;
[0015] e. an HCDR1, an HCDR2, and an HCDR3 as set forth in SEQ ID NO:138, and an LCDR1, an LCDR2, and an LCDR3 as set forth in SEQ ID NO:139;
[0016] f. an HCDR1, an HCDR2, and an HCDR3 as set forth in SEQ ID NO:144, and an LCDR1, an LCDR2, and an LCDR3 as set forth in SEQ ID NO:145;
[0017] g. an HCDR1, an HCDR2, and an HCDR3 as set forth in SEQ ID NO:152, and an LCDR1, an LCDR2, and an LCDR3 as set forth in SEQ ID NO:153;
[0018] h. an HCDR1, an HCDR2, and an HCDR3 as set forth in SEQ ID NO:154, and an LCDR1, an LCDR2, and an LCDR3 as set forth in SEQ ID NO:155;
[0019] i. an HCDR1, an HCDR2, and an HCDR3 as set forth in SEQ ID NO:156, and an LCDR1, an LCDR2, and an LCDR3 as set forth in SEQ ID NO:157;
[0020] j. an HCDR1, an HCDR2, and an HCDR3 as set forth in SEQ ID NO:160, and an LCDR1, an LCDR2, and an LCDR3 as set forth in SEQ ID NO:161;
[0021] k. an HCDR1, an HCDR2, and an HCDR3 as set forth in SEQ ID NO:164, and an LCDR1, an LCDR2, and an LCDR3 as set forth in SEQ ID NO:165;
[0022] l. an HCDR1, an HCDR2, and an HCDR3 as set forth in SEQ ID NO:166, and an LCDR1, an LCDR2, and an LCDR3 as set forth in SEQ ID NO:167;
[0023] m. an HCDR1, an HCDR2, and an HCDR3 as set forth in SEQ ID NO:168, and an LCDR1, an LCDR2, and an LCDR3 as set forth in SEQ ID NO:169;
[0024] n. an HCDR1, an HCDR2, and an HCDR3 as set forth in SEQ ID NO:174, and an LCDR1, an LCDR2, and an LCDR3 as set forth in SEQ ID NO:175;
[0025] o. an HCDR1, an HCDR2, and an HCDR3 as set forth in SEQ ID NO:788, and an LCDR1, an LCDR2, and an LCDR3 as set forth in SEQ ID NO:789;
[0026] p. an HCDR1, an HCDR2, and an HCDR3 as set forth in SEQ ID NO:186, and an LCDR1, an LCDR2, and an LCDR3 as set forth in SEQ ID NO:187;
[0027] q. an HCDR1, an HCDR2, and an HCDR3 as set forth in SEQ ID NO:828, and an LCDR1, an LCDR2, and an LCDR3 as set forth in SEQ ID NO:829;
[0028] r. an HCDR1, an HCDR2, and an HCDR3 as set forth in SEQ ID NO:790, and an LCDR1, an LCDR2, and an LCDR3 as set forth in SEQ ID NO:791;
[0029] s. an HCDR1, an HCDR2, and an HCDR3 as set forth in SEQ ID NO:188, and an LCDR1, an LCDR2, and an LCDR3 as set forth in SEQ ID NO:189;
[0030] t. an HCDR1, an HCDR2, and an HCDR3 as set forth in SEQ ID NO:884, and an LCDR1, an LCDR2, and an LCDR3 as set forth in SEQ ID NO:885;
[0031] u. an HCDR1, an HCDR2, and an HCDR3 as set forth in SEQ ID NO:192, and an LCDR1, an LCDR2, and an LCDR3 as set forth in SEQ ID NO:193;
[0032] v. an HCDR1, an HCDR2, and an HCDR3 as set forth in SEQ ID NO:194, and an LCDR1, an LCDR2, and an LCDR3 as set forth in SEQ ID NO:195;
[0033] w. an HCDR1, an HCDR2, and an HCDR3 as set forth in SEQ ID NO:198, and an LCDR1, an LCDR2, and an LCDR3 as set forth in SEQ ID NO:199;
[0034] x. an HCDR1, an HCDR2, and an HCDR3 as set forth in SEQ ID NO:200, and an LCDR1, an LCDR2, and an LCDR3 as set forth in SEQ ID NO:201;
[0035] y. an HCDR1, an HCDR2, and an HCDR3 as set forth in SEQ ID NO:202, and an LCDR1, an LCDR2, and an LCDR3 as set forth in SEQ ID NO:203;
[0036] z. an HCDR1, an HCDR2, and an HCDR3 as set forth in SEQ ID NO:204, and an LCDR1, an LCDR2, and an LCDR3 as set forth in SEQ ID NO:205;
[0037] aa. an HCDR1, an HCDR2, and an HCDR3 as set forth in SEQ ID NO:206, and an LCDR1, an LCDR2, and an LCDR3 as set forth in SEQ ID NO:207;
[0038] bb. an HCDR1, an HCDR2, and an HCDR3 as set forth in SEQ ID NO:216, and an LCDR1, an LCDR2, and an LCDR3 as set forth in SEQ ID NO:217;
[0039] cc. an HCDR1, an HCDR2, and an HCDR3 as set forth in SEQ ID NO:222, and an LCDR1, an LCDR2, and an LCDR3 as set forth in SEQ ID NO:223;
[0040] dd. an HCDR1, an HCDR2, and an HCDR3 as set forth in SEQ ID NO:230, and an LCDR1, an LCDR2, and an LCDR3 as set forth in SEQ ID NO:231;
[0041] ee. an HCDR1, an HCDR2, and an HCDR3 as set forth in SEQ ID NO:232, and an LCDR1, an LCDR2, and an LCDR3 as set forth in SEQ ID NO:233;
[0042] ff. an HCDR1, an HCDR2, and an HCDR3 as set forth in SEQ ID NO:234, and an LCDR1, an LCDR2, and an LCDR3 as set forth in SEQ ID NO:235;
[0043] gg. an HCDR1, an HCDR2, and an HCDR3 as set forth in SEQ ID NO:238, and an LCDR1, an LCDR2, and an LCDR3 as set forth in SEQ ID NO:239;
[0044] hh. an HCDR1, an HCDR2, and an HCDR3 as set forth in SEQ ID NO:246, and an LCDR1, an LCDR2, and an LCDR3 as set forth in SEQ ID NO:247;
[0045] ii. an HCDR1, an HCDR2, and an HCDR3 as set forth in SEQ ID NO:248, and an LCDR1, an LCDR2, and an LCDR3 as set forth in SEQ ID NO:249;
[0046] jj. an HCDR1, an HCDR2, and an HCDR3 as set forth in SEQ ID NO:254, and an LCDR1, an LCDR2, and an LCDR3 as set forth in SEQ ID NO:255;
[0047] kk. an HCDR1, an HCDR2, and an HCDR3 as set forth in SEQ ID NO:260, and an LCDR1, an LCDR2, and an LCDR3 as set forth in SEQ ID NO:261;
[0048] ll. an HCDR1, an HCDR2, and an HCDR3 as set forth in SEQ ID NO:262, and a LCDR1, an LCDR2, and an LCDR3 as set forth in SEQ ID NO:263; or
[0049] mm. an HCDR1, an HCDR2, and an HCDR3 as set forth in SEQ ID NO:264, and an LCDR1, an LCDR2, and an LCDR3 as set forth in SEQ ID NO:265.

[0050] In an embodiment, an antibody or antigen binding fragment thereof is provided that binds human interleukin-23 receptor (IL-23R) on a mammalian cell, wherein the antibody or fragment comprises:
[0051] a. a VH comprising an HCDR1, an HCDR2, and an HCDR3 having an amino acid sequence of SEQ ID NOs:900, 901, and 902, respectively, and a VL comprising an LCDR1, an LCDR2, and an LCDR3 having an amino acid sequence of SEQ ID NOs:903, 904, and 905, respectively;
[0052] b. a VH comprising an HCDR1, an HCDR2, and an HCDR3 having an amino acid sequence of SEQ ID NOs:276, 277, and 278, respectively, and a VL comprising an LCDR1, an LCDR2, and an LCDR3 having an amino acid sequence of SEQ ID NOs:279, 280, and 281, respectively;
[0053] c. a VH comprising an HCDR1, an HCDR2, and an HCDR3 having an amino acid sequence of SEQ ID NOs:294, 295, and 296, respectively, and a VL comprising an LCDR1, an LCDR2, and an LCDR3 having an amino acid sequence of SEQ ID NOs:297, 298, and 299, respectively;
[0054] d. a VH comprising an HCDR1, an HCDR2, and an HCDR3 having an amino acid sequence of SEQ ID NOs:318, 319, and 320, respectively, and a VL comprising an LCDR1, an LCDR2, and an LCDR3 having an amino acid sequence of SEQ ID NOs:321, 322, and 323, respectively;
[0055] e. a VH comprising an HCDR1, an HCDR2, and an HCDR3 having an amino acid sequence of SEQ ID NOs:324, 325, and 326, respectively, and a VL comprising an LCDR1, an LCDR2, and an LCDR3 having an amino acid sequence of SEQ ID NOs:327, 328, and 329, respectively;
[0056] f. a VH comprising an HCDR1, an HCDR2, and an HCDR3 having an amino acid sequence of SEQ ID NOs:330, 331, and 332, respectively, and a VL comprising an LCDR1, an LCDR2, and an LCDR3 having an amino acid sequence of SEQ ID NOs:333, 334, and 335, respectively;
[0057] g. a VH comprising an HCDR1, an HCDR2, and an HCDR3 having an amino acid sequence of SEQ ID NOs:342, 343, and 344, respectively, and a VL comprising an LCDR1, an LCDR2, and an LCDR3 having an amino acid sequence of SEQ ID NOs:345, 346, and 347, respectively;
[0058] h. a VH comprising an HCDR1, an HCDR2, and an HCDR3 having an amino acid sequence of SEQ ID NOs:354, 355, and 356, respectively, and a VL comprising an LCDR1, an LCDR2, and an LCDR3 having an amino acid sequence of SEQ ID NOs:357, 358, and 359, respectively;
[0059] i. a VH comprising an HCDR1, an HCDR2, and an HCDR3 having an amino acid sequence of SEQ ID NOs:360, 361, and 362, respectively, and a VL comprising an LCDR1, an LCDR2, and an LCDR3 having an amino acid sequence of SEQ ID NOs:363, 364, and 365, respectively;
[0060] j. a VH comprising an HCDR1, an HCDR2, and an HCDR3 having an amino acid sequence of SEQ ID NOs:366, 367, and 368, respectively, and a VL comprising an LCDR1, an LCDR2, and an LCDR3 having an amino acid sequence of SEQ ID NOs:369, 370, and 371, respectively;
[0061] k. a VH comprising an HCDR1, an HCDR2, and an HCDR3 having an amino acid sequence of SEQ ID NOs:384, 385, and 386, respectively, and a VL comprising an LCDR1, an LCDR2, and an LCDR3 having an amino acid sequence of SEQ ID NOs:387, 388, and 389, respectively;
[0062] l. a VH comprising an HCDR1, an HCDR2, and an HCDR3 having an amino acid sequence of SEQ ID NOs:906, 907, and 908, respectively, and a VL comprising an LCDR1, an LCDR2, and an LCDR3 having an amino acid sequence of SEQ ID NOs:909, 910, and 911, respectively;
[0063] m. a VH comprising an HCDR1, an HCDR2, and an HCDR3 having an amino acid sequence of SEQ ID NOs:420, 421, and 422, respectively, and a VL comprising an LCDR1, an LCDR2, and an LCDR3 having an amino acid sequence of SEQ ID NOs:423, 424, and 425, respectively;
[0064] n. a VH comprising an HCDR1, an HCDR2, and an HCDR3 having an amino acid sequence of SEQ ID NOs:1026, 1027, and 1028, respectively, and a VL comprising an LCDR1, an LCDR2, and an LCDR3 having an amino acid sequence of SEQ ID NOs:1029, 1030, and 1031, respectively;
[0065] o. a VH comprising an HCDR1, an HCDR2, and an HCDR3 having an amino acid sequence of SEQ ID NOs:912, 913, and 914, respectively, and a VL comprising an LCDR1, an LCDR2, and an LCDR3 having an amino acid sequence of SEQ ID NOs:915, 916, and 917, respectively;
[0066] p. a VH comprising an HCDR1, an HCDR2, and an HCDR3 having an amino acid sequence of SEQ ID NOs:426, 427, and 428, respectively, and a VL comprising an LCDR1, an LCDR2, and an LCDR3 having an amino acid sequence of SEQ ID NOs:429, 430, and 431, respectively;
[0067] q. a VH comprising an HCDR1, an HCDR2, and an HCDR3 having an amino acid sequence of SEQ ID NOs:1194, 1195, and 1196, respectively, and a VL comprising an LCDR1, an LCDR2, and an LCDR3 having an amino acid sequence of SEQ ID NOs:1197, 1198, and 1199, respectively;
[0068] r. a VH comprising an HCDR1, an HCDR2, and an HCDR3 having an amino acid sequence of SEQ ID NOs:438, 439, and 440, respectively, and a VL comprising an LCDR1, an LCDR2, and an LCDR3 having an amino acid sequence of SEQ ID NOs:441, 442, and 443, respectively;
[0069] s. a VH comprising an HCDR1, an HCDR2, and an HCDR3 having an amino acid sequence of SEQ ID NOs:444, 445, and 446, respectively, and a VL comprising an LCDR1, an LCDR2, and an LCDR3 having an amino acid sequence of SEQ ID NOs:447, 448, and 449, respectively;
[0070] t. a VH comprising an HCDR1, an HCDR2, and an HCDR3 having an amino acid sequence of SEQ ID NOs:456, 457, and 458, respectively, and a VL comprising an LCDR1, an LCDR2, and an LCDR3 having an amino acid sequence of SEQ ID NOs:459, 460, and 461, respectively;
[0071] u. a VH comprising an HCDR1, an HCDR2, and an HCDR3 having an amino acid sequence of SEQ ID NOs:462, 463, and 464, respectively, and a VL comprising an LCDR1, an LCDR2, and an LCDR3 having an amino acid sequence of SEQ ID NOs:465, 466, and 467, respectively;
[0072] v. a VH comprising an HCDR1, an HCDR2, and an HCDR3 having an amino acid sequence of SEQ ID NOs:918, 919, and 920, respectively, and a VL comprising an LCDR1, an LCDR2, and an LCDR3 having an amino acid sequence of SEQ ID NOs:921, 922, and 923, respectively;
[0073] w. a VH comprising an HCDR1, an HCDR2, and an HCDR3 having an amino acid sequence of SEQ ID NOs:468, 469, and 470, respectively, and a VL comprising an LCDR1, an LCDR2, and an LCDR3 having an amino acid sequence of SEQ ID NOs:471, 472, and 473, respectively;
[0074] x. a VH comprising an HCDR1, an HCDR2, and an HCDR3 having an amino acid sequence of SEQ ID NOs:474, 475, and 476, respectively, and a VL comprising an LCDR1, an LCDR2, and an LCDR3 having an amino acid sequence of SEQ ID NOs:477, 478, and 479, respectively;
[0075] y. a VH comprising an HCDR1, an HCDR2, and an HCDR3 having an amino acid sequence of SEQ ID NOs:480, 481, and 482, respectively, and a VL comprising an LCDR1, an LCDR2, and an LCDR3 having an amino acid sequence of SEQ ID NOs:483, 484, and 485, respectively;
[0076] z. a VH comprising an HCDR1, an HCDR2, and an HCDR3 having an amino acid sequence of SEQ ID NOs:510, 511, and 512, respectively, and a VL comprising an LCDR1, an LCDR2, and an LCDR3 having an amino acid sequence of SEQ ID NOs:513, 514, and 515, respectively;
[0077] aa. a VH comprising an HCDR1, an HCDR2, and an HCDR3 having an amino acid sequence of SEQ ID NOs:528, 529, and 530, respectively, and a VL comprising an LCDR1, an LCDR2, and an LCDR3 having an amino acid sequence of SEQ ID NOs:531, 532, and 533, respectively;
[0078] bb. a VH comprising an HCDR1, an HCDR2, and an HCDR3 having an amino acid sequence of SEQ ID NOs:936, 937, and 938, respectively, and a VL comprising an LCDR1, an LCDR2, and an LCDR3 having an amino acid sequence of SEQ ID NOs:939, 940, and 941, respectively;
[0079] cc. a VH comprising an HCDR1, an HCDR2, and an HCDR3 having an amino acid sequence of SEQ ID NOs:552, 553, and 554, respectively, and a VL comprising an LCDR1, an LCDR2, and an LCDR3 having an amino acid sequence of SEQ ID NOs:555, 556, and 557, respectively;
[0080] dd. a VH comprising an HCDR1, an HCDR2, and an HCDR3 having an amino acid sequence of SEQ ID NOs:558, 559, and 560, respectively, and a VL comprising an LCDR1, an LCDR2, and an LCDR3 having an amino acid sequence of SEQ ID NOs:561, 562, and 563, respectively;
[0081] ee. a VH comprising an HCDR1, an HCDR2, and an HCDR3 having an amino acid sequence of SEQ ID NOs:564, 565, and 566, respectively, and a VL comprising an LCDR1, an LCDR2, and an LCDR3 having an amino acid sequence of SEQ ID NOs:567, 568, and 569, respectively;
[0082] ff. a VH comprising an HCDR1, an HCDR2, and an HCDR3 having an amino acid sequence of SEQ ID NOs:570, 571, and 572, respectively, and a VL comprising an LCDR1, an LCDR2, and an LCDR3 having an amino acid sequence of SEQ ID NOs:573, 574, and 575, respectively;
[0083] gg. a VH comprising an HCDR1, an HCDR2, and an HCDR3 having an amino acid sequence of SEQ ID NOs:576, 577, and 578, respectively, and a VL comprising an LCDR1, an LCDR2, and an LCDR3 having an amino acid sequence of SEQ ID NOs:579, 580, and 581, respectively;
[0084] hh. a VH comprising an HCDR1, an HCDR2, and an HCDR3 having an amino acid sequence of SEQ ID NOs:600, 601, and 602, respectively, and a VL comprising an LCDR1, an LCDR2, and an LCDR3 having an amino acid sequence of SEQ ID NOs:603, 604, and 605, respectively;
[0085] ii. a VH comprising an HCDR1, an HCDR2, and an HCDR3 having an amino acid sequence of SEQ ID NOs:606, 607, and 608, respectively, and a VL comprising an LCDR1, an LCDR2, and an LCDR3 having an amino acid sequence of SEQ ID NOs:609, 610, and 611, respectively;
[0086] jj. a VH comprising an HCDR1, an HCDR2, and an HCDR3 having an amino acid sequence of SEQ ID NOs:624, 625, and 626, respectively, and a VL comprising an LCDR1, an LCDR2, and an LCDR3 having an amino acid sequence of SEQ ID NOs:627, 628, and 629, respectively;
[0087] kk. a VH comprising an HCDR1, an HCDR2, and an HCDR3 having an amino acid sequence of SEQ ID NOs:642, 643, and 644, respectively, and a VL comprising an LCDR1, an LCDR2, and an LCDR3 having an amino acid sequence of SEQ ID NOs:645, 646, and 647, respectively;
[0088] ll. a VH comprising an HCDR1, an HCDR2, and an HCDR3 having an amino acid sequence of SEQ ID NOs:648, 649, and 650, respectively, and a VL comprising an LCDR1, an LCDR2, and an LCDR3 having an amino acid sequence of SEQ ID NOs:651, 652, and 653, respectively; or
[0089] mm. a VH comprising an HCDR1, an HCDR2, and an HCDR3 having an amino acid sequence of SEQ ID NOs:654, 655, and 656, respectively, and a VL comprising an LCDR1, an LCDR2, and an LCDR3 having an amino acid sequence of SEQ ID NOs:657, 658, and 659, respectively.

[0090] In an embodiment, an antibody or antigen binding fragment thereof is provided that binds human interleukin-23 receptor (IL-23R) on a mammalian cell, wherein the antibody or fragment comprises:
[0091] a. a VH comprising the amino acid sequence of SEQ ID NO:786, and a VL comprising the amino acid sequence of SEQ ID NO:787;
[0092] b. a VH comprising the amino acid sequence of SEQ ID NO:138, and a VL comprising the amino acid sequence of SEQ ID NO:139;
[0093] c. a VH comprising the amino acid sequence of SEQ ID NO:144, and a VL comprising the amino acid sequence of SEQ ID NO:145;
[0094] d. a VH comprising the amino acid sequence of SEQ ID NO:152, and a VL comprising the amino acid sequence of SEQ ID NO:153;
[0095] e. a VH comprising the amino acid sequence of SEQ ID NO:154, and a VL comprising the amino acid sequence of SEQ ID NO:155;
[0096] f. a VH comprising the amino acid sequence of SEQ ID NO:156, and a VL comprising the amino acid sequence of SEQ ID NO:157;
[0097] g. a VH comprising the amino acid sequence of SEQ ID NO:160, and a VL comprising the amino acid sequence of SEQ ID NO:161;
[0098] h. a VH comprising the amino acid sequence of SEQ ID NO:164, and a VL comprising the amino acid sequence of SEQ ID NO:165;
[0099] i. a VH comprising the amino acid sequence of SEQ ID NO:166, and a VL comprising the amino acid sequence of SEQ ID NO:167;
[0100] j. a VH comprising the amino acid sequence of SEQ ID NO:168, and a VL comprising the amino acid sequence of SEQ ID NO:169;
[0101] k. a VH comprising the amino acid sequence of SEQ ID NO:174, and a VL comprising the amino acid sequence of SEQ ID NO:175;
[0102] l. a VH comprising the amino acid sequence of SEQ ID NO:788, and a VL comprising the amino acid sequence of SEQ ID NO:789;
[0103] m. a VH comprising the amino acid sequence of SEQ ID NO:186, and a VL comprising the amino acid sequence of SEQ ID NO:187;
[0104] n. a VH comprising the amino acid sequence of SEQ ID NO:828, and a VL comprising the amino acid sequence of SEQ ID NO:829;
[0105] o. a VH comprising the amino acid sequence of SEQ ID NO:790, and a VL comprising the amino acid sequence of SEQ ID NO:791;
[0106] p. a VH comprising the amino acid sequence of SEQ ID NO:188, and a VL comprising the amino acid sequence of SEQ ID NO:189;
[0107] q. a VH comprising the amino acid sequence of SEQ ID NO:884, and a VL comprising the amino acid sequence of SEQ ID NO:885;
[0108] r. a VH comprising the amino acid sequence of SEQ ID NO:192, and a VL comprising the amino acid sequence of SEQ ID NO:193;
[0109] s. a VH comprising the amino acid sequence of SEQ ID NO:194, and a VL comprising the amino acid sequence of SEQ ID NO:195;
[0110] t. a VH comprising the amino acid sequence of SEQ ID NO:198, and a VL comprising the amino acid sequence of SEQ ID NO:199;
[0111] u. a VH comprising the amino acid sequence of SEQ ID NO:200, and a VL comprising the amino acid sequence of SEQ ID NO:201;
[0112] v. a VH comprising the amino acid sequence of SEQ ID NO:792, and a VL comprising the amino acid sequence of SEQ ID NO:793;
[0113] w. a VH comprising the amino acid sequence of SEQ ID NO:202, and a VL comprising the amino acid sequence of SEQ ID NO:203;
[0114] x. a VH comprising the amino acid sequence of SEQ ID NO:204, and a VL comprising the amino acid sequence of SEQ ID NO:205;
[0115] y. a VH comprising the amino acid sequence of SEQ ID NO:206, and a VL comprising the amino acid sequence of SEQ ID NO:207;
[0116] z. a VH comprising the amino acid sequence of SEQ ID NO:216, and a VL comprising the amino acid sequence of SEQ ID NO:217;
[0117] aa. a VH comprising the amino acid sequence of SEQ ID NO:222, and a VL comprising the amino acid sequence of SEQ ID NO:223;
[0118] bb. a VH comprising the amino acid sequence of SEQ ID NO:798, and a VL comprising the amino acid sequence of SEQ ID NO:799;
[0119] cc. a VH comprising the amino acid sequence of SEQ ID NO:230, and a VL comprising the amino acid sequence of SEQ ID NO:231;
[0120] dd. a VH comprising the amino acid sequence of SEQ ID NO:232, and a VL comprising the amino acid sequence of SEQ ID NO:233;
[0121] ee. a VH comprising the amino acid sequence of SEQ ID NO:234, and a VL comprising the amino acid sequence of SEQ ID NO:235;
[0122] ff. a VH comprising the amino acid sequence of SEQ ID NO:236, and a VL comprising the amino acid sequence of SEQ ID NO:237;
[0123] gg. a VH comprising the amino acid sequence of SEQ ID NO:238, and a VL comprising the amino acid sequence of SEQ ID NO:239;
[0124] hh. a VH comprising the amino acid sequence of SEQ ID NO:246, and a VL comprising the amino acid sequence of SEQ ID NO:247;
[0125] ii. a VH comprising the amino acid sequence of SEQ ID NO:248, and a VL comprising the amino acid sequence of SEQ ID NO:249;
[0126] jj. a VH comprising the amino acid sequence of SEQ ID NO:254, and a VL comprising the amino acid sequence of SEQ ID NO:255;
[0127] kk. a VH comprising the amino acid sequence of SEQ ID NO:260, and a VL comprising the amino acid sequence of SEQ ID NO:261;
[0128] ll. a VH comprising the amino acid sequence of SEQ ID NO:262, and a VL comprising the amino acid sequence of SEQ ID NO:263; or
[0129] mm. a VH comprising the amino acid sequence of SEQ ID NO:264, and a VL comprising the amino acid sequence of SEQ ID NO:265.

[0130] In some embodiments, antibody that binds human interleukin-23 receptor (IL-23R) on a mammalian cell is selected from antibody I23RB1, I23RB3, I23RB4, I23RB7 and I23RB76. In an embodiment, the mammalian cell is a human cell or a rat cell. In an embodiment, the cell is an immune cell. In an embodiment, the cell is a primary immune cell. In an embodiment, the cell is a human primary immune cell or a rat primary immune cell. In an embodiment, the cell is a human T cell or a rat T cell. In embodiments, the cell(s) may be or may include include αβ T cells, including CD4+ and CD8+ T cells, γδ T cells, natural killer (NK) cells, innate lymphoid cells (ILCs), or monocyte-derived macrophages. In embodiments, the cell(s) may be or may include include αβ T cells, including CD4+ and CD8+ T cells, or γδ T cells. In some embodiments, the cell is a natural killer (NK) cell. In some embodiments, the cell is an innate lymphoid cell (ILC). In some embodiments, the cell is a monocyte-derived macrophage.

[0131] In an embodiment, monoclonal antibody or active fragment thereof is provided that binds human interleukin-23 receptor (IL-23R) on a mammalian cell of claim 1, wherein the antibody or fragment comprises:
[0132] a. an HCDR1, and HCDR2 and an HCDR3 as set forth in SEQ ID NO:786, and an LCDR1, LCDR2 and LCDR3 set forth in SEQ ID NO:787;
[0133] b. an HCDR1, and HCDR2 and an HCDR3 as set forth in SEQ ID NO:790, and an LCDR1, LCDR2 and LCDR3 set forth in SEQ ID NO:791;
[0134] c. an HCDR1, and HCDR2 and an HCDR3 as set forth in SEQ ID NO:792, and an LCDR1, LCDR2 and LCDR3 set forth in SEQ ID NO:793;
[0135] d. an HCDR1, and HCDR2 and an HCDR3 as set forth in SEQ ID NO:798, and an LCDR1, LCDR2 and LCDR3 set forth in SEQ ID NO:799; or
[0136] e. an HCDR1, and HCDR2 and an HCDR3 as set forth in SEQ ID NO:236, and an LCDR1, LCDR2 and LCDR3 set forth in SEQ ID NO:237.

[0137] In an embodiment, antibody or antigen binding fragment thereof is provided that binds human interleukin-23 receptor (IL-23R) on a mammalian cell, wherein the antibody or fragment comprises:
[0138] a. a VH comprising an HCDR1, and HCDR2 and an HCDR3 having an amino acid sequence of SEQ ID NOs:900, 901, and 902, respectively and a VL comprising an LCDR1, an LCDR2, and an LCDR3 having an amino acid sequence of SEQ ID NOs:903, 904, and 905, respectively;
[0139] b. a VH comprising an HCDR1, and HCDR2 and an HCDR3 having an amino acid sequence of SEQ ID NOs:912, 913, and 914, respectively and a VL comprising an LCDR1, an LCDR2, and an LCDR3 having an amino acid sequence of SEQ ID NOs:915, 916, and 917, respectively;
[0140] c. a VH comprising an HCDR1, and HCDR2 and an HCDR3 having an amino acid sequence of SEQ ID NOs:918, 919, and 920, respectively and a VL comprising an LCDR1, an LCDR2, and an LCDR3 having an amino acid sequence of SEQ ID NOs:921, 922, and 923, respectively;
[0141] d. a VH comprising an HCDR1, and HCDR2 and an HCDR3 having an amino acid sequence of SEQ ID NOs:936, 937, and 938, respectively and a VL comprising an LCDR1, an LCDR2, and an LCDR3 having an amino acid sequence of SEQ ID NOs:939, 940, and 941, respectively; or
[0142] e. a VH comprising an HCDR1, and HCDR2 and an HCDR3 having an amino acid sequence of SEQ ID NOs:570, 571, and 572, respectively and a VL comprising an LCDR1, an LCDR2, and an LCDR3 having an amino acid sequence of SEQ ID NOs:573, 574, and 575, respectively.

[0143] In an embodiment, antibody or antigen binding fragment thereof is provided that binds human interleukin-23 receptor (IL-23R) on a mammalian cell, wherein the antibody or fragment comprises:
[0144] a. a VH comprising the amino acid sequence of SEQ ID NO:786, and a VL comprising the amino acid sequence of SEQ ID NO:787;
[0145] b. a VH comprising the amino acid sequence of SEQ ID NO:790, and a VL comprising the amino acid sequence of SEQ ID NO:791;
[0146] c. a VH comprising the amino acid sequence of SEQ ID NO:792, and a VL comprising the amino acid sequence of SEQ ID NO:793;
[0147] d. a VH comprising the amino acid sequence of SEQ ID NO:798, and a VL comprising the amino acid sequence of SEQ ID NO:799; or
[0148] e. a VH comprising the amino acid sequence of SEQ ID NO:236, and a VL comprising the amino acid sequence of SEQ ID NO:237.

[0149] In some embodiments, antibody that binds interleukin-23 receptor (IL-23R) on a mammalian cell is selected from I23RB4, I23RB7 and I23RB76. In an embodiment, the mammalian cell is a human cell or a rat cell. In an embodiment, the cell is an immune cell. In an embodiment, the cell is a primary immune cell. In an embodiment, the cell is a human primary immune cell or a rat primary immune cell. In an embodiment, the cell is a human T cell or a rat T cell. In embodiments, the cell(s) may be or may include include αβ T cells, including CD4+ and CD8+ T cells, γδ T cells, natural killer (NK) cells, innate lymphoid cells (ILCs), or monocyte-derived macrophages. In embodiments, the cell(s) may be or may include include αβ T cells, including CD4+ and CD8+ T cells, or γδ T cells. In some embodiments, the cell is a natural killer (NK) cell. In some embodiments, the cell is an innate lymphoid cell (ILC). In some embodiments, the cell is a monocyte-derived macrophage.

[0150] In an embodiment thereof, antibody or antigen binding fragment thereof is provided that binds human interleukin-23 receptor (IL-23R) on the surface of cells including primary human immune cells, wherein the antibody or fragment comprises:
[0151] a. a VH comprising an HCDR1, and HCDR2 and an HCDR3 having an amino acid sequence of SEQ ID NOs:918, 919, and 920, respectively and a VL comprising an LCDR1, an LCDR2, and an LCDR3 having an amino acid sequence of SEQ ID NOs:921, 922, and 923, respectively;
[0152] b. a VH comprising an HCDR1, and HCDR2 and an HCDR3 having an amino acid sequence of SEQ ID NOs:936, 937, and 938, respectively and a VL comprising an LCDR1, an LCDR2, and an LCDR3 having an amino acid sequence of SEQ ID NOs:939, 940, and 941, respectively; or
[0153] c. a VH comprising an HCDR1, and HCDR2 and an HCDR3 having an amino acid sequence of SEQ ID NOs:570, 571, and 572, respectively and a VL comprising an LCDR1, an LCDR2, and an LCDR3 having an amino acid sequence of SEQ ID NOs:573, 574, and 575, respectively.

[0154] In an embodiment, antibody or antigen binding fragment thereof is provided that binds human interleukin-23 receptor (IL-23R) on a mammalian cell, wherein the antibody or fragment comprises:
[0155] a. a VH comprising the amino acid sequence of SEQ ID NO:792, and a VL comprising the amino acid sequence of SEQ ID NO:793;
[0156] b. a VH comprising the amino acid sequence of SEQ ID NO:798, and a VL comprising the amino acid sequence of SEQ ID NO:799; or
[0157] c. a VH comprising the amino acid sequence of SEQ ID NO:236, and a VL comprising the amino acid sequence of SEQ ID NO:237.

[0158] In another embodiment, antibody and antigen binding fragments thereof are provided herein wherein the antibody (and binding fragment) recognizes and/or binds both human and rat IL-23R. In embodiments, the antibody and fragment recognizes and binds both rat and human IL-23R extracellular domain (ECD). In some embodiments, antibody is selected from I23RB42, I23RB85, I23RB157, I23RB7, I23RB153, I23RB45, I23RB318, I23RB30 and 123RB56

[0159] In some embodiments, isolated monoclonal antibody or antigen binding fragment thereof is provided which recognizes human and rat IL-23R, wherein the antibody or fragment comprises:
[0160] a. an HCDR1, and HCDR2 and an HCDR3 as set forth in SEQ ID NO:202, and an LCDR1, LCDR2 and LCDR3 set forth in SEQ ID NO:203;
[0161] b. an HCDR1, and HCDR2 and an HCDR3 as set forth in SEQ ID NO:252, and an LCDR1, LCDR2 and LCDR3 set forth in SEQ ID NO:253;
[0162] c. an HCDR1, and HCDR2 and an HCDR3 as set forth in SEQ ID NO:156, and an LCDR1, LCDR2 and LCDR3 set forth in SEQ ID NO:157;
[0163] d. an HCDR1, and HCDR2 and an HCDR3 as set forth in SEQ ID NO:798, and an LCDR1, LCDR2 and LCDR3 set forth in SEQ ID NO:799;
[0164] e. an HCDR1, and HCDR2 and an HCDR3 as set forth in SEQ ID NO:150, and an LCDR1, LCDR2 and LCDR3 set forth in SEQ ID NO:151;
[0165] f. an HCDR1, and HCDR2 and an HCDR3 as set forth in SEQ ID NO:204, and an LCDR1, LCDR2 and LCDR3 set forth in SEQ ID NO:205;
[0166] g. an HCDR1, and HCDR2 and an HCDR3 as set forth in SEQ ID NO:884, and an LCDR1, LCDR2 and LCDR3 set forth in SEQ ID NO:885;
[0167] h. an HCDR1, and HCDR2 and an HCDR3 as set forth in SEQ ID NO:188, and an LCDR1, LCDR2 and LCDR3 set forth in SEQ ID NO:189; or
[0168] i. an HCDR1, and HCDR2 and an HCDR3 as set forth in SEQ ID NO:212, and an LCDR1, LCDR2 and LCDR3 set forth in SEQ ID NO:213.

[0169] In embodiments, antibody or antigen binding fragment thereof is provided which recognizes human and rat IL-23R, wherein the antibody or fragment comprises:
[0170] a. a VH comprising an HCDR1, and HCDR2 and an HCDR3 having an amino acid sequence of SEQ ID NOs:468, 469, and 470, respectively and a VL comprising an LCDR1, an LCDR2, and an LCDR3 having an amino acid sequence of SEQ ID NOs:471, 472, and 473, respectively;
[0171] b. a VH comprising an HCDR1, and HCDR2 and an HCDR3 having an amino acid sequence of SEQ ID NOs:618, 619, and 620, respectively and a VL comprising an LCDR1, an LCDR2, and an LCDR3 having an amino acid sequence of SEQ ID NOs:621, 622, and 623,
[0172] c. a VH comprising an HCDR1, and HCDR2 and an HCDR3 having an amino acid sequence of SEQ ID NOs:330, 331, and 332, respectively and a VL comprising an LCDR1, an LCDR2, and an LCDR3 having an amino acid sequence of SEQ ID NOs:333, 334, and 335, respectively;
[0173] d. a VH comprising an HCDR1, and HCDR2 and an HCDR3 having an amino acid sequence of SEQ ID NOs:936,937, and 938, respectively and a VL comprising an LCDR1, an LCDR2, and an LCDR3 having an amino acid sequence of SEQ ID NOs:939, 940, and 941, respectively;
[0174] e. a VH comprising an HCDR1, and HCDR2 and an HCDR3 having an amino acid sequence of SEQ ID NOs:312, 313, and 314, respectively and a VL comprising an LCDR1, an LCDR2, and an LCDR3 having an amino acid sequence of SEQ ID NOs:315, 316, and 317, respectively;
[0175] f. a VH comprising an HCDR1, and HCDR2 and an HCDR3 having an amino acid sequence of SEQ ID NOs:474, 475, and 476, respectively and a VL comprising an LCDR1, an LCDR2, and an LCDR3 having an amino acid sequence of SEQ ID NOs:477, 478, and 479, respectively;
[0176] g. a VH comprising an HCDR1, and HCDR2 and an HCDR3 having an amino acid sequence of SEQ ID NOs:1194, 1195, and 1196, respectively and a VL comprising an LCDR1, an LCDR2, and an LCDR3 having an amino acid sequence of SEQ ID NOs:1197, 1198, and 1199, respectively;
[0177] h. a VH comprising an HCDR1, and HCDR2 and an HCDR3 having an amino acid sequence of SEQ ID NOs:426, 427, and 428, respectively and a VL comprising an LCDR1, an LCDR2, and an LCDR3 having an amino acid sequence of SEQ ID NOs:429, 430, and 431, respectively; or
[0178] i. a VH comprising an HCDR1, and HCDR2 and an HCDR3 having an amino acid sequence of SEQ ID NOs:498, 499, and 500, respectively and a VL comprising an LCDR1, an LCDR2, and an LCDR3 having an amino acid sequence of SEQ ID NOs:501, 502, and 503, respectively.

[0179] In some embodiments, antibody or antigen binding fragment thereof is provided which recognizes human and rat IL-23R, wherein the antibody or fragment comprises:
[0180] a. a VH comprising the amino acid sequence of SEQ ID NO:202, and a VL comprising the amino acid sequence of SEQ ID NO:203;
[0181] b. a VH comprising the amino acid sequence of SEQ ID NO:252, and a VL comprising the amino acid sequence of SEQ ID NO:253;
[0182] c. a VH comprising the amino acid sequence of SEQ ID NO:156, and a VL comprising the amino acid sequence of SEQ ID NO:157;
[0183] d. a VH comprising the amino acid sequence of SEQ ID NO:798, and a VL comprising the amino acid sequence of SEQ ID NO:799;
[0184] e. a VH comprising the amino acid sequence of SEQ ID NO:150, and a VL comprising the amino acid sequence of SEQ ID NO:151;
[0185] f. a VH comprising the amino acid sequence of SEQ ID NO:204, and a VL comprising the amino acid sequence of SEQ ID NO:205;
[0186] g. a VH comprising the amino acid sequence of SEQ ID NO:884, and a VL comprising the amino acid sequence of SEQ ID NO:885;
[0187] h. a VH comprising the amino acid sequence of SEQ ID NO:188, and a VL comprising the amino acid sequence of SEQ ID NO:189; or
[0188] i. a VH comprising the amino acid sequence of SEQ ID NO:212, and a VL comprising the amino acid sequence of SEQ ID NO:213.

[0189] In other embodiments, antibodies are provided which share a common light chain sequence. In some embodiments, the antibodies share a VL amino acid sequence. In come embodiments, the antibodies share a LC amino acid sequence. In embodiments, the antibodies share light chain CDR1, CDR2 and CDR3 amino acid sequences.

[0190] In a first group (Group 1), the following antibodies share identical VL, LC and light chain CDR sequences: I23RB1, RB2, RB3, RB4, RB8, RB9, RB268, RB270, RB291. In accordance with one aspect ooof this embodiment is provided antibody or antigen binding fragment thereof that binds IL-23R comprising a VL comprising CDR sequences of an LCDR1 SEQ ID NO:1252, an LCDR2 SEQ ID NO:1253, and an LCDR3 SEQ ID NO:1254 and a VH comprising CDR sequences selected from:
[0191] a. an HCDR1 SEQ ID NO:900, an HCDR2 SEQ ID NO:901 and an HCDR3 SEQ ID NO:902;
[0192] b. an HCDR1 SEQ ID NO:906, an HCDR2 SEQ ID NO:907, and an HCDR3 SEQ ID NO:908;
[0193] c. an HCDR1 SEQ ID NO:912, an HCDR2 SEQ ID NO:913, and an HCDR3 SEQ ID NO:914;
[0194] d. an HCDR1 SEQ ID NO:918, an HCDR2 SEQ ID NO:919, and an HCDR3 SEQ ID NO:920;
[0195] e. an HCDR1 SEQ ID NO:942, an HCDR2 SEQ ID NO:943, and an HCDR3 SEQ ID NO:944;
[0196] f. an HCDR1 SEQ ID NO:948, an HCDR2 SEQ ID NO:949, and an HCDR3 SEQ ID NO:950;
[0197] g. an HCDR1 SEQ ID NO: 1014, an HCDR2 SEQ ID NO: 1015, and an HCDR3 SEQ ID NO:1016;
[0198] h. an HCDR1 SEQ ID NO: 1026, an HCDR2 SEQ ID NO: 1027, and an HCDR3 SEQ ID NO:1028; and
[0199] i. an HCDR1 SEQ ID NO:1152, an HCDR2 SEQ ID NO:1153, and an HCDR3 SEQ ID NO:1154.

[0200] In an embodiment antibody or antigen binding fragment thereof is provided comprising a VL comprising CDR sequences of an LCDR1 SEQ ID NO:1252, an LCDR2 SEQ ID NO:1253, and an LCDR3 SEQ ID NO: 1254 or having the amino acid sequence SEQ ID NO:1247 and a VH sequence selected from SEQ ID NO:786, 788, 790, 792, 800, 802, 824, 828 and 870.

[0201] In a second group (Group 2), the following antibodies share identical VL, LC and light chain CDR sequences: I23RB5, I23RB266, I23RB271, I23RB273, I23RB274, I23RB275, I23RB276, I23RB277, I23RB279, I23RB281, I23RB282, I23RB284, I23RB285, I23RB286, I23RB289, I23RB290 and I23RB292. In accordance with one aspect of this embodiment is provided antibody or antigen binding fragment thereof that binds IL-23R comprising a VL comprising CDR sequences of an LCDR1 SEQ ID NO: 1255, an LCDR2 SEQ ID NO:1256, and an LCDR3 SEQ ID NO:1257 and a VH comprising CDR sequences selected from:
[0202] a. an HCDR1 SEQ ID NO:924, an HCDR2 SEQ ID NO:925, and an HCDR3 SEQ ID NO:926;
[0203] b. an HCDR1 SEQ ID NO: 1002, an HCDR2 SEQ ID NO: 1003, and an HCDR3 SEQ ID NO: 1004;
[0204] c. an HCDR1 SEQ ID NO:1032, an HCDR2 SEQ ID NO:1033, and an HCDR3 SEQ ID NO: 1034;
[0205] d. an HCDR1 SEQ ID NO: 1044, an HCDR2 SEQ ID NO: 1045, and an HCDR3 SEQ ID NO: 1046;
[0206] e. an HCDR1 SEQ ID NO:1050, an HCDR2 SEQ ID NO:1051, and an HCDR3 SEQ ID NO: 1052;
[0207] f. an HCDR1 SEQ ID NO: 1056, an HCDR2 SEQ ID NO: 1057, and an HCDR3 SEQ ID NO: 1058;
[0208] g. an HCDR1 SEQ ID NO: 1062, an HCDR2 SEQ ID NO: 1063, and an HCDR3 SEQ ID NO: 1064;
[0209] h. an HCDR1 SEQ ID NO: 1068, an HCDR2 SEQ ID NO: 1069, and an HCDR3 SEQ ID NO: 1070;
[0210] i. an HCDR1 SEQ ID NO:1080, an HCDR2 SEQ ID NO:1081, and an HCDR3 SEQ ID NO: 1082;
[0211] j. an HCDR1 SEQ ID NO:1092, an HCDR2 SEQ ID NO:1093, and an HCDR3 SEQ ID NO: 1094;
[0212] k. an HCDR1 SEQ ID NO: 1098, an HCDR2 SEQ ID NO: 1099, and an HCDR3 SEQ ID NO: 1100;
[0213] l. an HCDR1 SEQ ID NO:1110, an HCDR2 SEQ ID NO:1111, and an HCDR3 SEQ ID NO:1112;
[0214] m. an HCDR1 SEQ ID NO:1122, an HCDR2 SEQ ID NO:1123, and an HCDR3 SEQ ID NO:1124;
[0215] n. an HCDR1 SEQ ID NO:1140, an HCDR2 SEQ ID NO:1141, and an HCDR3 SEQ ID NO:1142;
[0216] o. an HCDR1 SEQ ID NO: 1146, an HCDR2 SEQ ID NO: 1147, and an HCDR3 SEQ ID NO:1148; and
[0217] p. an HCDR1 SEQ ID NO: 1158, an HCDR2 SEQ ID NO: 1159, and an HCDR3 SEQ ID NO:1160.

[0218] In some embodiments, antibody or antigen binding fragment thereof is provided comprising a VL comprising CDR sequences of an LCDR1 SEQ ID NO:1255, an LCDR2 SEQ ID NO:1256, and an LCDR3 SEQ ID NO: 1257 or having the amino acid sequence SEQ ID NO:1248 and a VH sequence selected from SEQ ID NO:794, 820, 830, 834, 836, 838, 840, 842, 846, 850, 852, 856, 860, 866, 868 and 872.

[0219] In a third group (Group 3), the following antibodies share identical VL, LC and light chain CDR sequences: I23RB6 and I23RB10. In accordance with one aspect of this embodiment is provided antibody or antigen binding fragment thereof that binds IL-23R comprising a VL comprising CDR sequences of an LCDR1 SEQ ID NO:1258, an LCDR2 SEQ ID NO:1259, and an LCDR3 SEQ ID NO: 1260 and a VH comprising CDR sequences selected from:
[0220] a. an HCDR1 SEQ ID NO:930, an HCDR2 SEQ ID NO:931, and an HCDR3 SEQ ID NO:932; and
[0221] b. an HCDR1 SEQ ID NO:954, an HCDR2 SEQ ID NO:955, and an HCDR3 SEQ ID NO:956.

[0222] In an embodiment, antibody or antigen binding fragment thereof is provided comprising a VL comprising CDR sequences of an LCDR1 SEQ ID NO:1258, an LCDR2 SEQ ID NO:1259, and an LCDR3 SEQ ID NO: 1260 or having the amino acid sequence SEQ ID NO:1249 and a VH sequence selected from SEQ ID NO:796 and 804.

[0223] In a fourth group (Group 2), the following antibodies share identical VL, LC and light chain CDR sequences: I23RB259 and I23RB316. In accordance with one aspect of this embodiment is provided antibody or antigen binding fragment thereof that binds IL-23R comprising a VL comprising CDR sequences of an LCDR1 SEQ ID NO:1261, an LCDR2 SEQ ID NO:1262, and an LCDR3 SEQ ID NO:1263 and a VH comprising CDR sequences selected from:
[0224] a. an HCDR1 SEQ ID NO:960, an HCDR2 SEQ ID NO:961, and an HCDR3 SEQ ID NO:962; and
[0225] b. an HCDR1 SEQ ID NO:1182, an HCDR2 SEQ ID NO:1183, and an HCDR3 SEQ ID NO:1184.

[0226] In an embodiment, antibody or antigen binding fragment thereof is provided comprising a VL comprising CDR sequences of an LCDR1 SEQ ID NO:1261, an LCDR2 SEQ ID NO:1262, and an LCDR3 SEQ ID NO: 1263 or having the amino acid sequence SEQ ID NO:1250 and a VH sequence selected from SEQ ID NO:806 and 880.

[0227] In a fifth group (Group 5), the following antibodies share identical VL, LC and light chain CDR sequences: I23RB267, I23RB3269, I23RB272, I23RB278, I23RB280, I23RB283, I23RB287 and I23RB288. In accordance with one aspect of this embodiment is provided antibody or antigen binding fragment thereof that binds IL-23R comprising a VL comprising CDR sequences of an LCDR1 SEQ ID NO:1264, an LCDR2 SEQ ID NO:1265, and an LCDR3 SEQ ID NO: 1266 and a VH comprising CDR sequences selected from:
[0228] a. an HCDR1 SEQ ID NO:1008, an HCDR2 SEQ ID NO:1009, and an HCDR3 SEQ ID NO:1010;
[0229] b. an HCDR1 SEQ ID NO: 1020, an HCDR2 SEQ ID NO:1021, and an HCDR3 SEQ ID NO:1022;
[0230] c. an HCDR1 SEQ ID NO:1038, an HCDR2 SEQ ID NO:1039, and an HCDR3 SEQ ID NO: 1040;
[0231] d. an HCDR1 SEQ ID NO: 1074, an HCDR2 SEQ ID NO: 1075, and an HCDR3 SEQ ID NO: 1076;
[0232] e. an HCDR1 SEQ ID NO:1086, an HCDR2 SEQ ID NO:1087, and an HCDR3 SEQ ID NO: 1088;
[0233] f. an HCDR1 SEQ ID NO: 1104, an HCDR2 SEQ ID NO: 1105, and an HCDR3 SEQ ID NO: 1106;
[0234] g. an HCDR1 SEQ ID NO: 1128, an HCDR2 SEQ ID NO: 1129, and an HCDR3 SEQ ID NO:1130; and
[0235] h. an HCDR1 SEQ ID NO:1134, an HCDR2 SEQ ID NO:1135, and an HCDR3 SEQ ID NO: 1136.

[0236] In an embodiment, antibody or antigen binding fragment thereof is provided comprising a VL comprising CDR sequences of an LCDR1 SEQ ID NO:1264, an LCDR2 SEQ ID NO:1265, and an LCDR3 SEQ ID NO: 1266 or having the amino acid sequence SEQ ID NO:1251 and a VH sequence selected from SEQ ID NO: 806 and 880 822, 826, 832, 844, 848, 854, 862 and 864.

[0237] In a particular embodiment of the invention, a VHH antibody (also denoted as heavy chain domain antibody or as a nanobody) are provided, including antibodies or fragments thereof which consist of heavy chain sequence only. In an embodiment, herein is provided VHH antibody or nanobody that binds IL-23R comprising a VH sequence selected from SEQ ID NO:786, 788, 790, 792, 800, 802, 824, 828, 870, 794, 820, 830, 834, 836, 838, 840, 842, 846, 850, 852, 856, 860, 866, 868, 872, 796, 804, 806, 880, 822, 826, 832, 844, 848, 854, 862 and 864.

[0238] IL-23R binding antibodies are provided herein. In some embodiments, antibody or antigen binding fragment thereof is provided that binds IL-23R comprising:
[0239] a. an HCDR1, an HCDR2, and an HCDR3 as set forth in SEQ ID NO:138, and an LCDR1, an LCDR2, and an LCDR3 as set forth in SEQ ID NO:139;
[0240] b. an HCDR1, an HCDR2, and an HCDR3 as set forth in SEQ ID NO:142, and an LCDR1, an LCDR2, and an LCDR3 as set forth in SEQ ID NO:143;
[0241] c. an HCDR1, an HCDR2, and an HCDR3 as set forth in SEQ ID NO:144, and an LCDR1, an LCDR2, and an LCDR3 as set forth in SEQ ID NO:145;
[0242] d. an HCDR1, an HCDR2, and an HCDR3 as set forth in SEQ ID NO:148, and an LCDR1, an LCDR2, and an LCDR3 as set forth in SEQ ID NO:149;
[0243] e. an HCDR1, an HCDR2, and an HCDR3 as set forth in SEQ ID NO:150, and an LCDR1, an LCDR2, and an LCDR3 as set forth in SEQ ID NO:151;
[0244] f. an HCDR1, an HCDR2, and an HCDR3 as set forth in SEQ ID NO:152, and an LCDR1, an LCDR2, and an LCDR3 as set forth in SEQ ID NO:153;
[0245] g. an HCDR1, an HCDR2, and an HCDR3 as set forth in SEQ ID NO:154, and an LCDR1, an LCDR2, and an LCDR3 as set forth in SEQ ID NO:155;
[0246] h. an HCDR1, an HCDR2, and an HCDR3 as set forth in SEQ ID NO:156, and an LCDR1, an LCDR2, and an LCDR3 as set forth in SEQ ID NO:157;
[0247] i. an HCDR1, an HCDR2, and an HCDR3 as set forth in SEQ ID NO:158, and an LCDR1, an LCDR2, and an LCDR3 as set forth in SEQ ID NO:159;
[0248] j. an HCDR1, an HCDR2, and an HCDR3 as set forth in SEQ ID NO:160, and an LCDR1, an LCDR2, and an LCDR3 as set forth in SEQ ID NO:161;
[0249] k. an HCDR1, an HCDR2, and an HCDR3 as set forth in SEQ ID NO:162, and an LCDR1, an LCDR2, and an LCDR3 as set forth in SEQ ID NO:163;
[0250] l. an HCDR1, an HCDR2, and an HCDR3 as set forth in SEQ ID NO:164, and an LCDR1, an LCDR2, and an LCDR3 as set forth in SEQ ID NO:165;
[0251] m. an HCDR1, an HCDR2, and an HCDR3 as set forth in SEQ ID NO:166, and an LCDR1, an LCDR2, and an LCDR3 as set forth in SEQ ID NO:167;
[0252] n. an HCDR1, an HCDR2, and an HCDR3 as set forth in SEQ ID NO:168, and an LCDR1, an LCDR2, and an LCDR3 as set forth in SEQ ID NO:169;
[0253] o. an HCDR1, an HCDR2, and an HCDR3 as set forth in SEQ ID NO:170, and an LCDR1, an LCDR2, and an LCDR3 as set forth in SEQ ID NO:171;
[0254] p. an HCDR1, an HCDR2, and an HCDR3 as set forth in SEQ ID NO:172, and an LCDR1, an LCDR2, and an LCDR3 as set forth in SEQ ID NO:173;
[0255] q. an HCDR1, an HCDR2, and an HCDR3 as set forth in SEQ ID NO:174, and an LCDR1, an LCDR2, and an LCDR3 as set forth in SEQ ID NO:175;
[0256] r. an HCDR1, an HCDR2, and an HCDR3 as set forth in SEQ ID NO:176, and an LCDR1, an LCDR2, and an LCDR3 as set forth in SEQ ID NO:177;
[0257] s. an HCDR1, an HCDR2, and an HCDR3 as set forth in SEQ ID NO:178, and an LCDR1, an LCDR2, and an LCDR3 as set forth in SEQ ID NO:179;
[0258] t. an HCDR1, an HCDR2, and an HCDR3 as set forth in SEQ ID NO:180, and an LCDR1, an LCDR2, and an LCDR3 as set forth in SEQ ID NO:181;
[0259] u. an HCDR1, an HCDR2, and an HCDR3 as set forth in SEQ ID NO:182, and an LCDR1, an LCDR2, and an LCDR3 as set forth in SEQ ID NO:183;
[0260] v. an HCDR1, an HCDR2, and an HCDR3 as set forth in SEQ ID NO:186, and an LCDR1, an LCDR2, and an LCDR3 as set forth in SEQ ID NO:187;
[0261] w. an HCDR1, an HCDR2, and an HCDR3 as set forth in SEQ ID NO:188, and an LCDR1, an LCDR2, and an LCDR3 as set forth in SEQ ID NO:189;
[0262] x. an HCDR1, an HCDR2, and an HCDR3 as set forth in SEQ ID NO:190, and an LCDR1, an LCDR2, and an LCDR3 as set forth in SEQ ID NO:191;
[0263] y. an HCDR1, an HCDR2, and an HCDR3 as set forth in SEQ ID NO:192, and an LCDR1, an LCDR2, and an LCDR3 as set forth in SEQ ID NO:193;
[0264] z. an HCDR1, an HCDR2, and an HCDR3 as set forth in SEQ ID NO:194, and an LCDR1, an LCDR2, and an LCDR3 as set forth in SEQ ID NO:195;
[0265] aa. an HCDR1, an HCDR2, and an HCDR3 as set forth in SEQ ID NO:196, and an LCDR1, an LCDR2, and an LCDR3 as set forth in SEQ ID NO:197;
[0266] bb. an HCDR1, an HCDR2, and an HCDR3 as set forth in SEQ ID NO:198, and an LCDR1, an LCDR2, and an LCDR3 as set forth in SEQ ID NO:199;
[0267] cc. an HCDR1, an HCDR2, and an HCDR3 as set forth in SEQ ID NO:200, and an LCDR1, an LCDR2, and an LCDR3 as set forth in SEQ ID NO:201;
[0268] dd. an HCDR1, an HCDR2, and an HCDR3 as set forth in SEQ ID NO:202, and an LCDR1, an LCDR2, and an LCDR3 as set forth in SEQ ID NO:203;
[0269] ee. an HCDR1, an HCDR2, and an HCDR3 as set forth in SEQ ID NO:204, and an LCDR1, an LCDR2, and an LCDR3 as set forth in SEQ ID NO:205;
[0270] ff. an HCDR1, an HCDR2, and an HCDR3 as set forth in SEQ ID NO:206, and an LCDR1, an LCDR2, and an LCDR3 as set forth in SEQ ID NO:207;
[0271] gg. an HCDR1, an HCDR2, and an HCDR3 as set forth in SEQ ID NO:208, and an LCDR1, an LCDR2, and an LCDR3 as set forth in SEQ ID NO:209;
[0272] hh. an HCDR1, an HCDR2, and an HCDR3 as set forth in SEQ ID NO:210, and an LCDR1, an LCDR2, and an LCDR3 as set forth in SEQ ID NO:211;
[0273] ii. an HCDR1, an HCDR2, and an HCDR3 as set forth in SEQ ID NO:212, and an LCDR1, an LCDR2, and an LCDR3 as set forth in SEQ ID NO:213;
[0274] jj. an HCDR1, an HCDR2, and an HCDR3 as set forth in SEQ ID NO:214, and an LCDR1, an LCDR2, and an LCDR3 as set forth in SEQ ID NO:215;
[0275] kk. an HCDR1, an HCDR2, and an HCDR3 as set forth in SEQ ID NO:216, and an LCDR1, an LCDR2, and an LCDR3 as set forth in SEQ ID NO:217;
[0276] ll. an HCDR1, an HCDR2, and an HCDR3 as set forth in SEQ ID NO:218, and an LCDR1, an LCDR2, and an LCDR3 as set forth in SEQ ID NO:219;
[0277] mm. an HCDR1, an HCDR2, and an HCDR3 as set forth in SEQ ID NO:220, and an LCDR1, an LCDR2, and an LCDR3 as set forth in SEQ ID NO:221;
[0278] nn. an HCDR1, an HCDR2, and an HCDR3 as set forth in SEQ ID NO:222, and an LCDR1, an LCDR2, and an LCDR3 as set forth in SEQ ID NO:223;
[0279] oo. an HCDR1, an HCDR2, and an HCDR3 as set forth in SEQ ID NO:226, and an LCDR1, an LCDR2, and an LCDR3 as set forth in SEQ ID NO:227;
[0280] pp. an HCDR1, an HCDR2, and an HCDR3 as set forth in SEQ ID NO:228, and an LCDR1, an LCDR2, and an LCDR3 as set forth in SEQ ID NO:229;
[0281] qq. an HCDR1, an HCDR2, and an HCDR3 as set forth in SEQ ID NO:230, and an LCDR1, an LCDR2, and an LCDR3 as set forth in SEQ ID NO:231;
[0282] rr. an HCDR1, an HCDR2, and an HCDR3 as set forth in SEQ ID NO:232, and an LCDR1, an LCDR2, and an LCDR3 as set forth in SEQ ID NO:233;
[0283] ss. an HCDR1, an HCDR2, and an HCDR3 as set forth in SEQ ID NO:234, and an LCDR1, an LCDR2, and an LCDR3 as set forth in SEQ ID NO:235;
[0284] tt. an HCDR1, an HCDR2, and an HCDR3 as set forth in SEQ ID NO:236, and an LCDR1, an LCDR2, and an LCDR3 as set forth in SEQ ID NO:237;
[0285] uu. an HCDR1, an HCDR2, and an HCDR3 as set forth in SEQ ID NO:238, and an LCDR1, an LCDR2, and an LCDR3 as set forth in SEQ ID NO:239;
[0286] vv. an HCDR1, an HCDR2, and an HCDR3 as set forth in SEQ ID NO:240, and an LCDR1, an LCDR2, and an LCDR3 as set forth in SEQ ID NO:241;
[0287] ww. an HCDR1, an HCDR2, and an HCDR3 as set forth in SEQ ID NO:246, and an LCDR1, an LCDR2, and an LCDR3 as set forth in SEQ ID NO:247;
[0288] xx. an HCDR1, an HCDR2, and an HCDR3 as set forth in SEQ ID NO:248, and an LCDR1, an LCDR2, and an LCDR3 as set forth in SEQ ID NO:249;
[0289] yy. an HCDR1, an HCDR2, and an HCDR3 as set forth in SEQ ID NO:250, and an LCDR1, an LCDR2, and an LCDR3 as set forth in SEQ ID NO:251;
[0290] zz. an HCDR1, an HCDR2, and an HCDR3 as set forth in SEQ ID NO:252, and an LCDR1, an LCDR2, and an LCDR3 as set forth in SEQ ID NO:253;
[0291] aaa. an HCDR1, an HCDR2, and an HCDR3 as set forth in SEQ ID NO:254, and an LCDR1, an LCDR2, and an LCDR3 as set forth in SEQ ID NO:255;
[0292] bbb. an HCDR1, an HCDR2, and an HCDR3 as set forth in SEQ ID NO:256, and an LCDR1, an LCDR2, and an LCDR3 as set forth in SEQ ID NO:257;
[0293] ccc. an HCDR1, an HCDR2, and an HCDR3 as set forth in SEQ ID NO:258, and an LCDR1, an LCDR2, and an LCDR3 as set forth in SEQ ID NO:259;
[0294] ddd. an HCDR1, an HCDR2, and an HCDR3 as set forth in SEQ ID NO:260, and an LCDR1, an LCDR2, and an LCDR3 as set forth in SEQ ID NO:261;
[0295] eee. an HCDR1, an HCDR2, and an HCDR3 as set forth in SEQ ID NO:262, and a LCDR1, an LCDR2, and an LCDR3 as set forth in SEQ ID NO:263;
[0296] fff. an HCDR1, an HCDR2, and an HCDR3 as set forth in SEQ ID NO:264, and an LCDR1, an LCDR2, and an LCDR3 as set forth in SEQ ID NO:265;
[0297] ggg. an HCDR1, an HCDR2, and an HCDR3 as set forth in SEQ ID NO:268, and an LCDR1, an LCDR2, and an LCDR3 as set forth in SEQ ID NO:269;
[0298] hhh. an HCDR1, an HCDR2, and an HCDR3 as set forth in SEQ ID NO:786, and an LCDR1, an LCDR2, and an LCDR3 as set forth in SEQ ID NO:787;
[0299] iii. an HCDR1, an HCDR2, and an HCDR3 as set forth in SEQ ID NO:788, and an LCDR1, an LCDR2, and an LCDR3 as set forth in SEQ ID NO:789;
[0300] jjj. an HCDR1, an HCDR2, and an HCDR3 as set forth in SEQ ID NO:790, and an LCDR1, an LCDR2, and an LCDR3 as set forth in SEQ ID NO:791;
[0301] kkk. an HCDR1, an HCDR2, and an HCDR3 as set forth in SEQ ID NO:792, and an LCDR1, an LCDR2, and an LCDR3 as set forth in SEQ ID NO:793;
[0302] lll. an HCDR1, an HCDR2, and an HCDR3 as set forth in SEQ ID NO:798, and an LCDR1, an LCDR2, and an LCDR3 as set forth in SEQ ID NO:799;
[0303] mmm. an HCDR1, an HCDR2, and an HCDR3 as set forth in SEQ ID NO:806, and an LCDR1, an LCDR2, and an LCDR3 as set forth in SEQ ID NO:807;
[0304] nnn. an HCDR1, an HCDR2, and an HCDR3 as set forth in SEQ ID NO:808, and an LCDR1, an LCDR2, and an LCDR3 as set forth in SEQ ID NO:809;
[0305] ooo. an HCDR1, an HCDR2, and an HCDR3 as set forth in SEQ ID NO:810, and an LCDR1, an LCDR2, and an LCDR3 as set forth in SEQ ID NO:811;
[0306] ppp. an HCDR1, an HCDR2, and an HCDR3 as set forth in SEQ ID NO:812, and an LCDR1, an LCDR2, and an LCDR3 as set forth in SEQ ID NO:813;
[0307] qqq. an HCDR1, an HCDR2, and an HCDR3 as set forth in SEQ ID NO:814, and an LCDR1, an LCDR2, and an LCDR3 as set forth in SEQ ID NO:815;
[0308] rrr. an HCDR1, an HCDR2, and an HCDR3 as set forth in SEQ ID NO:816, and an LCDR1, an LCDR2, and an LCDR3 as set forth in SEQ ID NO:817;
[0309] sss. an HCDR1, an HCDR2, and an HCDR3 as set forth in SEQ ID NO:818, and an LCDR1, an LCDR2, and an LCDR3 as set forth in SEQ ID NO:819;
[0310] ttt. an HCDR1, an HCDR2, and an HCDR3 as set forth in SEQ ID NO:820, and an LCDR1, an LCDR2, and an LCDR3 as set forth in SEQ ID NO:821;
[0311] uuu. an HCDR1, an HCDR2, and an HCDR3 as set forth in SEQ ID NO:822, and an LCDR1, an LCDR2, and an LCDR3 as set forth in SEQ ID NO:823;
[0312] vvv. an HCDR1, an HCDR2, and an HCDR3 as set forth in SEQ ID NO:824, and an LCDR1, an LCDR2, and an LCDR3 as set forth in SEQ ID NO:825;
[0313] www. an HCDR1, an HCDR2, and an HCDR3 as set forth in SEQ ID NO:826, and an LCDR1, an LCDR2, and an LCDR3 as set forth in SEQ ID NO:827;
[0314] xxx. an HCDR1, an HCDR2, and an HCDR3 as set forth in SEQ ID NO:828, and an LCDR1, an LCDR2, and an LCDR3 as set forth in SEQ ID NO:829;
[0315] yyy. an HCDR1, an HCDR2, and an HCDR3 as set forth in SEQ ID NO:830, and an LCDR1, an LCDR2, and an LCDR3 as set forth in SEQ ID NO:831;
[0316] zzz. an HCDR1, an HCDR2, and an HCDR3 as set forth in SEQ ID NO:832, and an LCDR1, an LCDR2, and an LCDR3 as set forth in SEQ ID NO:833;
[0317] aaaa. an HCDR1, an HCDR2, and an HCDR3 as set forth in SEQ ID NO:836, and an LCDR1, an LCDR2, and an LCDR3 as set forth in SEQ ID NO:837;
[0318] bbbb. an HCDR1, an HCDR2, and an HCDR3 as set forth in SEQ ID NO:838, and an LCDR1, an LCDR2, and an LCDR3 as set forth in SEQ ID NO:839;
[0319] cccc. an HCDR1, an HCDR2, and an HCDR3 as set forth in SEQ ID NO:840, and an LCDR1, an LCDR2, and an LCDR3 as set forth in SEQ ID NO:841;
[0320] dddd. an HCDR1, an HCDR2, and an HCDR3 as set forth in SEQ ID NO: 842, and an LCDR1, an LCDR2, and an LCDR3 as set forth in SEQ ID NO:843;
[0321] eeee. an HCDR1, an HCDR2, and an HCDR3 as set forth in SEQ ID NO:846, and an LCDR1, an LCDR2, and an LCDR3 as set forth in SEQ ID NO:847;
[0322] ffff. an HCDR1, an HCDR2, and an HCDR3 as set forth in SEQ ID NO:848, and an LCDR1, an LCDR2, and an LCDR3 as set forth in SEQ ID NO:849;
[0323] gggg. an HCDR1, an HCDR2, and an HCDR3 as set forth in SEQ ID NO:850, and an LCDR1, an LCDR2, and an LCDR3 as set forth in SEQ ID NO:851;
[0324] hhhh. an HCDR1, an HCDR2, and an HCDR3 as set forth in SEQ ID NO:852, and an LCDR1, an LCDR2, and an LCDR3 as set forth in SEQ ID NO:853;
[0325] iiii. an HCDR1, an HCDR2, and an HCDR3 as set forth in SEQ ID NO:854, and an LCDR1, an LCDR2, and an LCDR3 as set forth in SEQ ID NO:855;
[0326] jjjj. an HCDR1, an HCDR2, and an HCDR3 as set forth in SEQ ID NO:856, and an LCDR1, an LCDR2, and an LCDR3 as set forth in SEQ ID NO:857;
[0327] kkkk. an HCDR1, an HCDR2, and an HCDR3 as set forth in SEQ ID NO:858, and an LCDR1, an LCDR2, and an LCDR3 as set forth in SEQ ID NO:859;
[0328] llll. an HCDR1, an HCDR2, and an HCDR3 as set forth in SEQ ID NO:860, and an LCDR1, an LCDR2, and an LCDR3 as set forth in SEQ ID NO:861;
[0329] mmmm. an HCDR1, an HCDR2, and an HCDR3 as set forth in SEQ ID NO:862, and an LCDR1, an LCDR2, and an LCDR3 as set forth in SEQ ID NO:863;
[0330] nnnn. an HCDR1, an HCDR2, and an HCDR3 as set forth in SEQ ID NO:864, and an LCDR1, an LCDR2, and an LCDR3 as set forth in SEQ ID NO:865;
[0331] oooo. an HCDR1, an HCDR2, and an HCDR3 as set forth in SEQ ID NO:866, and an LCDR1, an LCDR2, and an LCDR3 as set forth in SEQ ID NO:867;
[0332] pppp. an HCDR1, an HCDR2, and an HCDR3 as set forth in SEQ ID NO:868, and an LCDR1, an LCDR2, and an LCDR3 as set forth in SEQ ID NO:869;
[0333] qqqq. an HCDR1, an HCDR2, and an HCDR3 as set forth in SEQ ID NO:870, and an LCDR1, an LCDR2, and an LCDR3 as set forth in SEQ ID NO:871;
[0334] rrrr. an HCDR1, an HCDR2, and an HCDR3 as set forth in SEQ ID NO:872, and an LCDR1, an LCDR2, and an LCDR3 as set forth in SEQ ID NO:873;
[0335] ssss. an HCDR1, an HCDR2, and an HCDR3 as set forth in SEQ ID NO:874, and an LCDR1, an LCDR2, and an LCDR3 as set forth in SEQ ID NO:875;
[0336] tttt. an HCDR1, an HCDR2, and an HCDR3 as set forth in SEQ ID NO:876, and an LCDR1, an LCDR2, and an LCDR3 as set forth in SEQ ID NO:877;
[0337] uuuu. an HCDR1, an HCDR2, and an HCDR3 as set forth in SEQ ID NO:878, and an LCDR1, an LCDR2, and an LCDR3 as set forth in SEQ ID NO:879;
[0338] vvvv. an HCDR1, an HCDR2, and an HCDR3 as set forth in SEQ ID NO:880, and an LCDR1, an LCDR2, and an LCDR3 as set forth in SEQ ID NO:881;
[0339] wwww. an HCDR1, an HCDR2, and an HCDR3 as set forth in SEQ ID NO:882, and an LCDR1, an LCDR2, and an LCDR3 as set forth in SEQ ID NO:883;
[0340] xxxx. an HCDR1, an HCDR2, and an HCDR3 as set forth in SEQ ID NO:884, and an LCDR1, an LCDR2, and an LCDR3 as set forth in SEQ ID NO:885;
[0341] yyyy. an HCDR1, an HCDR2, and an HCDR3 as set forth in SEQ ID NO:886, and an LCDR1, an LCDR2, and an LCDR3 as set forth in SEQ ID NO:887;
[0342] zzzz. an HCDR1, an HCDR2, and an HCDR3 as set forth in SEQ ID NO:888, and an LCDR1, an LCDR2, and an LCDR3 as set forth in SEQ ID NO:889; or
[0343] aaaaa. an HCDR1, an HCDR2, and an HCDR3 as set forth in SEQ ID NO:890, and an LCDR1, an LCDR2, and an LCDR3 as set forth in SEQ ID NO:891.

[0344] In some embodiments, antibody or antigen binding fragment thereof is provided that binds IL-23R comprising:
[0345] a. a VH comprising an HCDR1, an HCDR2, and an HCDR3 having an amino acid sequence of SEQ ID NOs:276, 277, and 278, respectively, and a VL comprising an LCDR1, an LCDR2, and an LCDR3 having an amino acid sequence of SEQ ID NOs:279, 280, and 281, respectively;
[0346] b. a VH comprising an HCDR1, an HCDR2, and an HCDR3 having an amino acid sequence of SEQ ID NOs:288, 289, and 290, respectively, and a VL comprising an LCDR1, an LCDR2, and an LCDR3 having an amino acid sequence of SEQ ID NOs:291, 292, and 293, respectively;
[0347] c. a VH comprising an HCDR1, an HCDR2, and an HCDR3 having an amino acid sequence of SEQ ID NOs:294, 295, and 296, respectively, and a VL comprising an LCDR1, an LCDR2, and an LCDR3 having an amino acid sequence of SEQ ID NOs:297, 298, and 299, respectively;
[0348] d. a VH comprising an HCDR1, an HCDR2, and an HCDR3 having an amino acid sequence of SEQ ID NOs:306, 307, and 308, respectively, and a VL comprising an LCDR1, an LCDR2, and an LCDR3 having an amino acid sequence of SEQ ID NOs:309, 310, and 311, respectively;
[0349] e. a VH comprising an HCDR1, an HCDR2, and an HCDR3 having an amino acid sequence of SEQ ID NOs:312, 313, and 314, respectively, and a VL comprising an LCDR1, an LCDR2, and an LCDR3 having an amino acid sequence of SEQ ID NOs:315, 316, and 317, respectively;
[0350] f. a VH comprising an HCDR1, an HCDR2, and an HCDR3 having an amino acid sequence of SEQ ID NOs:318, 319, and 320, respectively, and a VL comprising an LCDR1, an LCDR2, and an LCDR3 having an amino acid sequence of SEQ ID NOs:321, 322, and 323, respectively;
[0351] g. a VH comprising an HCDR1, an HCDR2, and an HCDR3 having an amino acid sequence of SEQ ID NOs:324, 325, and 326, respectively, and a VL comprising an LCDR1, an LCDR2, and an LCDR3 having an amino acid sequence of SEQ ID NOs:327, 328, and 329, respectively;
[0352] h. a VH comprising an HCDR1, an HCDR2, and an HCDR3 having an amino acid sequence of SEQ ID NOs:330, 331, and 332, respectively, and a VL comprising an LCDR1, an LCDR2, and an LCDR3 having an amino acid sequence of SEQ ID NOs:333, 334, and 335, respectively;
[0353] i. a VH comprising an HCDR1, an HCDR2, and an HCDR3 having an amino acid sequence of SEQ ID NOs:336, 337, and 338, respectively, and a VL comprising an LCDR1, an LCDR2, and an LCDR3 having an amino acid sequence of SEQ ID NOs:339, 340, and 341, respectively;
[0354] j. a VH comprising an HCDR1, an HCDR2, and an HCDR3 having an amino acid sequence of SEQ ID NOs:342, 343, and 344, respectively, and a VL comprising an LCDR1, an LCDR2, and an LCDR3 having an amino acid sequence of SEQ ID NOs:345, 346, and 347, respectively;
[0355] k. a VH comprising an HCDR1, an HCDR2, and an HCDR3 having an amino acid sequence of SEQ ID NOs:348, 349, and 350, respectively, and a VL comprising an LCDR1, an LCDR2, and an LCDR3 having an amino acid sequence of SEQ ID NOs:351, 352, and 353, respectively;
[0356] l. a VH comprising an HCDR1, an HCDR2, and an HCDR3 having an amino acid sequence of SEQ ID NOs:354, 355, and 356, respectively, and a VL comprising an LCDR1, an LCDR2, and an LCDR3 having an amino acid sequence of SEQ ID NOs:357, 358, and 359, respectively;
[0357] m. a VH comprising an HCDR1, an HCDR2, and an HCDR3 having an amino acid sequence of SEQ ID NOs:360, 361, and 362, respectively, and a VL comprising an LCDR1, an LCDR2, and an LCDR3 having an amino acid sequence of SEQ ID NOs:363, 364, and 365, respectively;
[0358] n. a VH comprising an HCDR1, an HCDR2, and an HCDR3 having an amino acid sequence of SEQ ID NOs:366, 367, and 368, respectively, and a VL comprising an LCDR1, an LCDR2, and an LCDR3 having an amino acid sequence of SEQ ID NOs:369, 370, and 371, respectively;
[0359] o. a VH comprising an HCDR1, an HCDR2, and an HCDR3 having an amino acid sequence of SEQ ID NOs:372, 373, and 374, respectively, and a VL comprising an LCDR1, an LCDR2, and an LCDR3 having an amino acid sequence of SEQ ID NOs:375, 376, and 377, respectively;
[0360] p. a VH comprising an HCDR1, an HCDR2, and an HCDR3 having an amino acid sequence of SEQ ID NOs:378, 379, and 380, respectively, and a VL comprising an LCDR1, an LCDR2, and an LCDR3 having an amino acid sequence of SEQ ID NOs:381, 382, and 383, respectively;
[0361] q. a VH comprising an HCDR1, an HCDR2, and an HCDR3 having an amino acid sequence of SEQ ID NOs:384, 385, and 386, respectively, and a VL comprising an LCDR1, an LCDR2, and an LCDR3 having an amino acid sequence of SEQ ID NOs:387, 388, and 389, respectively;
[0362] r. a VH comprising an HCDR1, an HCDR2, and an HCDR3 having an amino acid sequence of SEQ ID NOs:390, 391, and 392, respectively, and a VL comprising an LCDR1, an LCDR2, and an LCDR3 having an amino acid sequence of SEQ ID NOs:393, 394, and 395, respectively;
[0363] s. a VH comprising an HCDR1, an HCDR2, and an HCDR3 having an amino acid sequence of SEQ ID NOs:396, 397, and 398, respectively, and a VL comprising an LCDR1, an LCDR2, and an LCDR3 having an amino acid sequence of SEQ ID NOs:399, 400, and 401, respectively;
[0364] t. a VH comprising an HCDR1, an HCDR2, and an HCDR3 having an amino acid sequence of SEQ ID NOs:402, 403, and 404, respectively, and a VL comprising an LCDR1, an LCDR2, and an LCDR3 having an amino acid sequence of SEQ ID NOs:405, 406, and 407, respectively;
[0365] u. a VH comprising an HCDR1, an HCDR2, and an HCDR3 having an amino acid sequence of SEQ ID NOs:408, 409, and 410, respectively, and a VL comprising an LCDR1, an LCDR2, and an LCDR3 having an amino acid sequence of SEQ ID NOs:411, 412, and 413, respectively;
[0366] v. a VH comprising an HCDR1, an HCDR2, and an HCDR3 having an amino acid sequence of SEQ ID NOs:420, 421, and 422, respectively, and a VL comprising an LCDR1, an LCDR2, and an LCDR3 having an amino acid sequence of SEQ ID NOs:423, 424, and 425, respectively;
[0367] w. a VH comprising an HCDR1, an HCDR2, and an HCDR3 having an amino acid sequence of SEQ ID NOs:426, 427, and 428, respectively, and a VL comprising an LCDR1, an LCDR2, and an LCDR3 having an amino acid sequence of SEQ ID NOs:429, 430, and 431, respectively;
[0368] x. a VH comprising an HCDR1, an HCDR2, and an HCDR3 having an amino acid sequence of SEQ ID NOs:432, 433, and 434, respectively, and a VL comprising an LCDR1, an LCDR2, and an LCDR3 having an amino acid sequence of SEQ ID NOs:435, 436, and 437, respectively;
[0369] y. a VH comprising an HCDR1, an HCDR2, and an HCDR3 having an amino acid sequence of SEQ ID NOs:438, 439, and 440, respectively, and a VL comprising an LCDR1, an LCDR2, and an LCDR3 having an amino acid sequence of SEQ ID NOs:441, 442, and 443, respectively;
[0370] z. a VH comprising an HCDR1, an HCDR2, and an HCDR3 having an amino acid sequence of SEQ ID NOs:444, 445, and 446, respectively, and a VL comprising an LCDR1, an LCDR2, and an LCDR3 having an amino acid sequence of SEQ ID NOs:447, 448, and 449, respectively;
[0371] aa. a VH comprising an HCDR1, an HCDR2, and an HCDR3 having an amino acid sequence of SEQ ID NOs:450, 451, and 452, respectively, and a VL comprising an LCDR1, an LCDR2, and an LCDR3 having an amino acid sequence of SEQ ID NOs:453, 454, and 455, respectively;
[0372] bb. a VH comprising an HCDR1, an HCDR2, and an HCDR3 having an amino acid sequence of SEQ ID NOs:456, 457, and 458, respectively, and a VL comprising an LCDR1, an LCDR2, and an LCDR3 having an amino acid sequence of SEQ ID NOs:459, 460, and 461, respectively;
[0373] cc. a VH comprising an HCDR1, an HCDR2, and an HCDR3 having an amino acid sequence of SEQ ID NOs:462, 463, and 464, respectively, and a VL comprising an LCDR1, an LCDR2, and an LCDR3 having an amino acid sequence of SEQ ID NOs:465, 466, and 467, respectively;
[0374] dd. a VH comprising an HCDR1, an HCDR2, and an HCDR3 having an amino acid sequence of SEQ ID NOs:468, 469, and 470, respectively, and a VL comprising an LCDR1, an LCDR2, and an LCDR3 having an amino acid sequence of SEQ ID NOs:471, 472, and 473, respectively;
[0375] ee. a VH comprising an HCDR1, an HCDR2, and an HCDR3 having an amino acid sequence of SEQ ID NOs:474, 475, and 476, respectively, and a VL comprising an LCDR1, an LCDR2, and an LCDR3 having an amino acid sequence of SEQ ID NOs:477, 478, and 479, respectively;
[0376] ff. a VH comprising an HCDR1, an HCDR2, and an HCDR3 having an amino acid sequence of SEQ ID NOs:480, 481, and 482, respectively, and a VL comprising an LCDR1, an LCDR2, and an LCDR3 having an amino acid sequence of SEQ ID NOs:483, 484, and 485, respectively;
[0377] gg. a VH comprising an HCDR1, an HCDR2, and an HCDR3 having an amino acid sequence of SEQ ID NOs:486, 487, and 488, respectively, and a VL comprising an LCDR1, an LCDR2, and an LCDR3 having an amino acid sequence of SEQ ID NOs:489, 490, and 491, respectively;
[0378] hh. a VH comprising an HCDR1, an HCDR2, and an HCDR3 having an amino acid sequence of SEQ ID NOs:492, 493, and 494, respectively, and a VL comprising an LCDR1, an LCDR2, and an LCDR3 having an amino acid sequence of SEQ ID NOs:495, 496, and 497, respectively;
[0379] ii. a VH comprising an HCDR1, an HCDR2, and an HCDR3 having an amino acid sequence of SEQ ID NOs:498, 499, and 500, respectively, and a VL comprising an LCDR1, an LCDR2, and an LCDR3 having an amino acid sequence of SEQ ID NOs:501, 502, and 503, respectively;
[0380] jj. a VH comprising an HCDR1, an HCDR2, and an HCDR3 having an amino acid sequence of SEQ ID NOs:504, 505, and 506, respectively, and a VL comprising an LCDR1, an LCDR2, and an LCDR3 having an amino acid sequence of SEQ ID NOs:507, 508, and 509, respectively;
[0381] kk. a VH comprising an HCDR1, an HCDR2, and an HCDR3 having an amino acid sequence of SEQ ID NOs:510, 511, and 512, respectively, and a VL comprising an LCDR1, an LCDR2, and an LCDR3 having an amino acid sequence of SEQ ID NOs:513, 514, and 515, respectively;
[0382] ll. a VH comprising an HCDR1, an HCDR2, and an HCDR3 having an amino acid sequence of SEQ ID NOs:516, 517, and 518, respectively, and a VL comprising an LCDR1, an LCDR2, and an LCDR3 having an amino acid sequence of SEQ ID NOs:519, 520, and 521, respectively;
[0383] mm. a VH comprising an HCDR1, an HCDR2, and an HCDR3 having an amino acid sequence of SEQ ID NOs:522, 523, and 524, respectively, and a VL comprising an LCDR1, an LCDR2, and an LCDR3 having an amino acid sequence of SEQ ID NOs:525, 526, and 527, respectively;
[0384] nn. a VH comprising an HCDR1, an HCDR2, and an HCDR3 having an amino acid sequence of SEQ ID NOs:528, 529, and 530, respectively, and a VL comprising an LCDR1, an LCDR2, and an LCDR3 having an amino acid sequence of SEQ ID NOs:531, 532, and 533, respectively;
[0385] oo. a VH comprising an HCDR1, an HCDR2, and an HCDR3 having an amino acid sequence of SEQ ID NOs:540, 541, and 542, respectively, and a VL comprising an LCDR1, an LCDR2, and an LCDR3 having an amino acid sequence of SEQ ID NOs:543, 544, and 545, respectively;
[0386] pp. a VH comprising an HCDR1, an HCDR2, and an HCDR3 having an amino acid sequence of SEQ ID NOs:546, 547, and 548, respectively, and a VL comprising an LCDR1, an LCDR2, and an LCDR3 having an amino acid sequence of SEQ ID NOs:549, 550, and 551, respectively;
[0387] qq. a VH comprising an HCDR1, an HCDR2, and an HCDR3 having an amino acid sequence of SEQ ID NOs:552, 553, and 554, respectively, and a VL comprising an LCDR1, an LCDR2, and an LCDR3 having an amino acid sequence of SEQ ID NOs:555, 556, and 557, respectively;
[0388] rr. a VH comprising an HCDR1, an HCDR2, and an HCDR3 having an amino acid sequence of SEQ ID NOs:558, 559, and 560, respectively, and a VL comprising an LCDR1, an LCDR2, and an LCDR3 having an amino acid sequence of SEQ ID NOs:561, 562, and 563, respectively;
[0389] ss. a VH comprising an HCDR1, an HCDR2, and an HCDR3 having an amino acid sequence of SEQ ID NOs:564, 565, and 566, respectively, and a VL comprising an LCDR1, an LCDR2, and an LCDR3 having an amino acid sequence of SEQ ID NOs:567, 568, and 569, respectively;
[0390] tt. a VH comprising an HCDR1, an HCDR2, and an HCDR3 having an amino acid sequence of SEQ ID NOs:570, 571, and 572, respectively, and a VL comprising an LCDR1, an LCDR2, and an LCDR3 having an amino acid sequence of SEQ ID NOs:573, 574, and 575, respectively;
[0391] uu. a VH comprising an HCDR1, an HCDR2, and an HCDR3 having an amino acid sequence of SEQ ID NOs:576, 577, and 578, respectively, and a VL comprising an LCDR1, an LCDR2, and an LCDR3 having an amino acid sequence of SEQ ID NOs:579, 580, and 581, respectively;
[0392] vv. a VH comprising an HCDR1, an HCDR2, and an HCDR3 having an amino acid sequence of SEQ ID NOs:582, 583, and 584, respectively, and a VL comprising an LCDR1, an LCDR2, and an LCDR3 having an amino acid sequence of SEQ ID NOs:585, 586, and 587, respectively;
[0393] ww. a VH comprising an HCDR1, an HCDR2, and an HCDR3 having an amino acid sequence of SEQ ID NOs:600, 601, and 602, respectively, and a VL comprising an LCDR1, an LCDR2, and an LCDR3 having an amino acid sequence of SEQ ID NOs:603, 604, and 605, respectively;
[0394] xx. a VH comprising an HCDR1, an HCDR2, and an HCDR3 having an amino acid sequence of SEQ ID NOs:606, 607, and 608, respectively, and a VL comprising an LCDR1, an LCDR2, and an LCDR3 having an amino acid sequence of SEQ ID NOs:609, 610, and 611, respectively;
[0395] yy. a VH comprising an HCDR1, an HCDR2, and an HCDR3 having an amino acid sequence of SEQ ID NOs:612, 613, and 614, respectively, and a VL comprising an LCDR1, an LCDR2, and an LCDR3 having an amino acid sequence of SEQ ID NOs:615, 616, and 617, respectively;
[0396] zz. a VH comprising an HCDR1, an HCDR2, and an HCDR3 having an amino acid sequence of SEQ ID NOs:618, 619, and 620, respectively, and a VL comprising an LCDR1, an LCDR2, and an LCDR3 having an amino acid sequence of SEQ ID NOs:621, 622, and 623, respectively;
[0397] aaa. a VH comprising an HCDR1, an HCDR2, and an HCDR3 having an amino acid sequence of SEQ ID NOs:624, 625, and 626, respectively, and a VL comprising an LCDR1, an LCDR2, and an LCDR3 having an amino acid sequence of SEQ ID NOs:627, 628, and 629, respectively;
[0398] bbb. a VH comprising an HCDR1, an HCDR2, and an HCDR3 having an amino acid sequence of SEQ ID NOs:630, 631, and 632, respectively, and a VL comprising an LCDR1, an LCDR2, and an LCDR3 having an amino acid sequence of SEQ ID NOs:633, 634, and 635, respectively;
[0399] ccc. a VH comprising an HCDR1, an HCDR2, and an HCDR3 having an amino acid sequence of SEQ ID NOs:636, 637, and 638, respectively, and a VL comprising an LCDR1, an LCDR2, and an LCDR3 having an amino acid sequence of SEQ ID NOs:639, 640, and 641, respectively;
[0400] ddd. a VH comprising an HCDR1, an HCDR2, and an HCDR3 having an amino acid sequence of SEQ ID NOs:642, 643, and 644, respectively, and a VL comprising an LCDR1, an LCDR2, and an LCDR3 having an amino acid sequence of SEQ ID NOs:645, 646, and 647, respectively;
[0401] eee. a VH comprising an HCDR1, an HCDR2, and an HCDR3 having an amino acid sequence of SEQ ID NOs:648, 649, and 650, respectively, and a VL comprising an LCDR1, an LCDR2, and an LCDR3 having an amino acid sequence of SEQ ID NOs:651, 652, and 653, respectively;
[0402] fff. a VH comprising an HCDR1, an HCDR2, and an HCDR3 having an amino acid sequence of SEQ ID NOs:654, 655, and 656, respectively, and a VL comprising an LCDR1, an LCDR2, and an LCDR3 having an amino acid sequence of SEQ ID NOs:657, 658, and 659, respectively;
[0403] ggg. a VH comprising an HCDR1, an HCDR2, and an HCDR3 having an amino acid sequence of SEQ ID NOs:666, 667, and 668, respectively, and a VL comprising an LCDR1, an LCDR2, and an LCDR3 having an amino acid sequence of SEQ ID NOs:669, 670, and 671, respectively;
[0404] hhh. a VH comprising an HCDR1, an HCDR2, and an HCDR3 having an amino acid sequence of SEQ ID NOs:900, 901, and 902, respectively, and a VL comprising an LCDR1, an LCDR2, and an LCDR3 having an amino acid sequence of SEQ ID NOs:903, 904, and 905, respectively;
[0405] iii. a VH comprising an HCDR1, an HCDR2, and an HCDR3 having an amino acid sequence of SEQ ID NOs:906, 907, and 908, respectively, and a VL comprising an LCDR1, an LCDR2, and an LCDR3 having an amino acid sequence of SEQ ID NOs:909, 910, and 911, respectively;
[0406] jjj. a VH comprising an HCDR1, an HCDR2, and an HCDR3 having an amino acid sequence of SEQ ID NOs:912, 913, and 914, respectively, and a VL comprising an LCDR1, an LCDR2, and an LCDR3 having an amino acid sequence of SEQ ID NOs:915, 916, and 917, respectively;
[0407] kkk. a VH comprising an HCDR1, an HCDR2, and an HCDR3 having an amino acid sequence of SEQ ID NOs:918, 919, and 920, respectively, and a VL comprising an LCDR1, an LCDR2, and an LCDR3 having an amino acid sequence of SEQ ID NOs:921, 922, and 923, respectively;
[0408] lll. a VH comprising an HCDR1, an HCDR2, and an HCDR3 having an amino acid sequence of SEQ ID NOs:936, 937, and 938, respectively, and a VL comprising an LCDR1, an LCDR2, and an LCDR3 having an amino acid sequence of SEQ ID NOs:939, 940, and 941, respectively;
[0409] mmm. a VH comprising an HCDR1, an HCDR2, and an HCDR3 having an amino acid sequence of SEQ ID NOs:960, 961, and 962, respectively, and a VL comprising an LCDR1, an LCDR2, and an LCDR3 having an amino acid sequence of SEQ ID NOs:963, 964, and 965, respectively;
[0410] nnn. a VH comprising an HCDR1, an HCDR2, and an HCDR3 having an amino acid sequence of SEQ ID NOs:966, 967, and 968, respectively, and a VL comprising an LCDR1, an LCDR2, and an LCDR3 having an amino acid sequence of SEQ ID NOs:969, 970, and 971, respectively;
[0411] ooo. a VH comprising an HCDR1, an HCDR2, and an HCDR3 having an amino acid sequence of SEQ ID NOs:972, 973, and 974, respectively, and a VL comprising an LCDR1, an LCDR2, and an LCDR3 having an amino acid sequence of SEQ ID NOs:975, 976, and 977, respectively;
[0412] ppp. a VH comprising an HCDR1, an HCDR2, and an HCDR3 having an amino acid sequence of SEQ ID NOs:978, 979, and 980, respectively, and a VL comprising an LCDR1, an LCDR2, and an LCDR3 having an amino acid sequence of SEQ ID NOs:981, 982, and 983, respectively;
[0413] qqq. a VH comprising an HCDR1, an HCDR2, and an HCDR3 having an amino acid sequence of SEQ ID NOs:984, 985, and 986, respectively, and a VL comprising an LCDR1, an LCDR2, and an LCDR3 having an amino acid sequence of SEQ ID NOs:987, 988, and 989, respectively;
[0414] rrr. a VH comprising an HCDR1, an HCDR2, and an HCDR3 having an amino acid sequence of SEQ ID NOs:990, 991, and 992, respectively, and a VL comprising an LCDR1, an LCDR2, and an LCDR3 having an amino acid sequence of SEQ ID NOs:993, 994, and 995, respectively;
[0415] sss. a VH comprising an HCDR1, an HCDR2, and an HCDR3 having an amino acid sequence of SEQ ID NOs:996, 997, and 998, respectively, and a VL comprising an LCDR1, an LCDR2, and an LCDR3 having an amino acid sequence of SEQ ID NOs:999, 1000, and 1001, respectively;
[0416] ttt. a VH comprising an HCDR1, an HCDR2, and an HCDR3 having an amino acid sequence of SEQ ID NOs:1002, 1003, and 1004, respectively, and a VL comprising an LCDR1, an LCDR2, and an LCDR3 having an amino acid sequence of SEQ ID NOs:1005, 1006, and 1007, respectively;
[0417] uuu. a VH comprising an HCDR1, an HCDR2, and an HCDR3 having an amino acid sequence of SEQ ID NOs:1008, 1009, and 1010, respectively, and a VL comprising an LCDR1, an LCDR2, and an LCDR3 having an amino acid sequence of SEQ ID NOs:1011, 1012, and 1013, respectively;
[0418] vvv. a VH comprising an HCDR1, an HCDR2, and an HCDR3 having an amino acid sequence of SEQ ID NOs:1014, 1015, and 1016, respectively, and a VL comprising an LCDR1, an LCDR2, and an LCDR3 having an amino acid sequence of SEQ ID NOs:1017, 1018, and 1019, respectively;
[0419] www.a VH comprising an HCDR1, an HCDR2, and an HCDR3 having an amino acid sequence of SEQ ID NOs:1020, 1021, and 1022, respectively, and a VL comprising an LCDR1, an LCDR2, and an LCDR3 having an amino acid sequence of SEQ ID NOs:1023, 1024, and 1025, respectively;
[0420] xxx. a VH comprising an HCDR1, an HCDR2, and an HCDR3 having an amino acid sequence of SEQ ID NOs:1026, 1027, and 1028, respectively, and a VL comprising an LCDR1, an LCDR2, and an LCDR3 having an amino acid sequence of SEQ ID NOs:1029, 1030, and 1031, respectively;
[0421] yyy. a VH comprising an HCDR1, an HCDR2, and an HCDR3 having an amino acid sequence of SEQ ID NOs:1032, 1033, and 1034, respectively, and a VL comprising an LCDR1, an LCDR2, and an LCDR3 having an amino acid sequence of SEQ ID NOs:1035, 1036, and 1037, respectively;
[0422] zzz. a VH comprising an HCDR1, an HCDR2, and an HCDR3 having an amino acid sequence of SEQ ID NOs:1038, 1039, and 1040, respectively, and a VL comprising an LCDR1, an LCDR2, and an LCDR3 having an amino acid sequence of SEQ ID NOs:1041, 1042, and 1043, respectively;
[0423] aaaa. a VH comprising an HCDR1, an HCDR2, and an HCDR3 having an amino acid sequence of SEQ ID NOs:1050, 1051, and 1052, respectively, and a VL comprising an LCDR1, an LCDR2, and an LCDR3 having an amino acid sequence of SEQ ID NOs:1053, 1054, and 1055, respectively;
[0424] bbbb. a VH comprising an HCDR1, an HCDR2, and an HCDR3 having an amino acid sequence of SEQ ID NOs:1056, 1057, and 1058, respectively, and a VL comprising an LCDR1, an LCDR2, and an LCDR3 having an amino acid sequence of SEQ ID NOs:1059, 1060, and 1061, respectively;
[0425] cccc. a VH comprising an HCDR1, an HCDR2, and an HCDR3 having an amino acid sequence of SEQ ID NOs:1062, 1063, and 1064, respectively, and a VL comprising an LCDR1, an LCDR2, and an LCDR3 having an amino acid sequence of SEQ ID NOs:1065, 1066, and 1067, respectively;
[0426] dddd. a VH comprising an HCDR1, an HCDR2, and an HCDR3 having an amino acid sequence of SEQ ID NOs:1068, 1069, and 1070, respectively, and a VL comprising an LCDR1, an LCDR2, and an LCDR3 having an amino acid sequence of SEQ ID NOs:1071, 1072, and 1073, respectively;
[0427] eeee. a VH comprising an HCDR1, an HCDR2, and an HCDR3 having an amino acid sequence of SEQ ID NOs:1080, 1081, and 1082, respectively, and a VL comprising an LCDR1, an LCDR2, and an LCDR3 having an amino acid sequence of SEQ ID NOs:1083, 1084, and 1085, respectively;
[0428] ffff. a VH comprising an HCDR1, an HCDR2, and an HCDR3 having an amino acid sequence of SEQ ID NOs:1086, 1087, and 1088, respectively, and a VL comprising an LCDR1, an LCDR2, and an LCDR3 having an amino acid sequence of SEQ ID NOs:1089, 1090, and 1091, respectively;
[0429] gggg. a VH comprising an HCDR1, an HCDR2, and an HCDR3 having an amino acid sequence of SEQ ID NOs:1092, 1093, and 1094, respectively, and a VL comprising an LCDR1, an LCDR2, and an LCDR3 having an amino acid sequence of SEQ ID NOs:1095, 1096, and 1097, respectively;
[0430] hhhh. a VH comprising an HCDR1, an HCDR2, and an HCDR3 having an amino acid sequence of SEQ ID NOs:1098, 1099, and 1100, respectively, and a VL comprising an LCDR1, an LCDR2, and an LCDR3 having an amino acid sequence of SEQ ID NOs:1101, 1102, and 1103, respectively;
[0431] iiii. a VH comprising an HCDR1, an HCDR2, and an HCDR3 having an amino acid sequence of SEQ ID NOs:1104, 1105, and 1106, respectively, and a VL comprising an LCDR1, an LCDR2, and an LCDR3 having an amino acid sequence of SEQ ID NOs:1107, 1108, and 1109, respectively;
[0432] jjjj. a VH comprising an HCDR1, an HCDR2, and an HCDR3 having an amino acid sequence of SEQ ID NOs:1110, 1111, and 1112, respectively, and a VL comprising an LCDR1, an LCDR2, and an LCDR3 having an amino acid sequence of SEQ ID NOs:1113, 1114, and 1115, respectively;
[0433] kkkk. a VH comprising an HCDR1, an HCDR2, and an HCDR3 having an amino acid sequence of SEQ ID NOs:1116, 1117, and 1118, respectively, and a VL comprising an LCDR1, an LCDR2, and an LCDR3 having an amino acid sequence of SEQ ID NOs:1119, 1120, and 1121, respectively;
[0434] llll. a VH comprising an HCDR1, an HCDR2, and an HCDR3 having an amino acid sequence of SEQ ID NOs:1122, 1123, and 1124, respectively, and a VL comprising an LCDR1, an LCDR2, and an LCDR3 having an amino acid sequence of SEQ ID NOs:1125, 1126, and 1127, respectively;
[0435] mmmm. a VH comprising an HCDR1, an HCDR2, and an HCDR3 having an amino acid sequence of SEQ ID NOs:1128, 1129, and 1130, respectively, and a VL comprising an LCDR1, an LCDR2, and an LCDR3 having an amino acid sequence of SEQ ID NOs:1131, 1132, and 1133, respectively;
[0436] nnnn. a VH comprising an HCDR1, an HCDR2, and an HCDR3 having an amino acid sequence of SEQ ID NOs:1134, 1135, and 1136, respectively, and a VL comprising an LCDR1, an LCDR2, and an LCDR3 having an amino acid sequence of SEQ ID NOs:1137, 1138, and 1139, respectively;
[0437] oooo. a VH comprising an HCDR1, an HCDR2, and an HCDR3 having an amino acid sequence of SEQ ID NOs:1140, 1141, and 1142, respectively, and a VL comprising an LCDR1, an LCDR2, and an LCDR3 having an amino acid sequence of SEQ ID NOs:1143, 1144, and 1145, respectively;
[0438] pppp. a VH comprising an HCDR1, an HCDR2, and an HCDR3 having an amino acid sequence of SEQ ID NOs:1146, 1147, and 1148, respectively, and a VL comprising an LCDR1, an LCDR2, and an LCDR3 having an amino acid sequence of SEQ ID NOs:1149, 1150, and 1151, respectively;
[0439] qqqq. a VH comprising an HCDR1, an HCDR2, and an HCDR3 having an amino acid sequence of SEQ ID NOs:1152, 1153, and 1154, respectively, and a VL comprising an LCDR1, an LCDR2, and an LCDR3 having an amino acid sequence of SEQ ID NOs:1155, 1156, and 1157, respectively;
[0440] rrrr. a VH comprising an HCDR1, an HCDR2, and an HCDR3 having an amino acid sequence of SEQ ID NOs:1158, 1159, and 1160, respectively, and a VL comprising an LCDR1, an LCDR2, and an LCDR3 having an amino acid sequence of SEQ ID NOs:1161, 1162, and 1163, respectively;
[0441] ssss. a VH comprising an HCDR1, an HCDR2, and an HCDR3 having an amino acid sequence of SEQ ID NOs:1164, 1165, and 1166, respectively, and a VL comprising an LCDR1, an LCDR2, and an LCDR3 having an amino acid sequence of SEQ ID NOs:1167, 1168, and 1169, respectively;
[0442] tttt. a VH comprising an HCDR1, an HCDR2, and an HCDR3 having an amino acid sequence of SEQ ID NOs:1170, 1171, and 1172, respectively, and a VL comprising an LCDR1, an LCDR2, and an LCDR3 having an amino acid sequence of SEQ ID NOs:1173, 1174, and 1175, respectively;
[0443] uuuu. a VH comprising an HCDR1, an HCDR2, and an HCDR3 having an amino acid sequence of SEQ ID NOs:1176, 1177, and 1178, respectively, and a VL comprising an LCDR1, an LCDR2, and an LCDR3 having an amino acid sequence of SEQ ID NOs:1179, 1180, and 1181, respectively;
[0444] vvvv. a VH comprising an HCDR1, an HCDR2, and an HCDR3 having an amino acid sequence of SEQ ID NOs:1182, 1183, and 1184, respectively, and a VL comprising an LCDR1, an LCDR2, and an LCDR3 having an amino acid sequence of SEQ ID NOs:1185, 1186, and 1187, respectively;
[0445] wwww. a VH comprising an HCDR1, an HCDR2, and an HCDR3 having an amino acid sequence of SEQ ID NOs:1188, 1189, and 1190, respectively, and a VL comprising an LCDR1, an LCDR2, and an LCDR3 having an amino acid sequence of SEQ ID NOs:1191, 1192, and 1193, respectively;
[0446] xxxx. a VH comprising an HCDR1, an HCDR2, and an HCDR3 having an amino acid sequence of SEQ ID NOs:1194, 1195, and 1196, respectively, and a VL comprising an LCDR1, an LCDR2, and an LCDR3 having an amino acid sequence of SEQ ID NOs:1197, 1198, and 1199, respectively;
[0447] yyyy. a VH comprising an HCDR1, an HCDR2, and an HCDR3 having an amino acid sequence of SEQ ID NOs:1200, 1201, and 1202, respectively, and a VL comprising an LCDR1, an LCDR2, and an LCDR3 having an amino acid sequence of SEQ ID NOs:1203, 1204, and 1205, respectively;
[0448] zzzz. a VH comprising an HCDR1, an HCDR2, and an HCDR3 having an amino acid sequence of SEQ ID NOs:1206, 1207, and 1208, respectively, and a VL comprising an LCDR1, an LCDR2, and an LCDR3 having an amino acid sequence of SEQ ID NOs:1209, 1210, and 1211, respectively; or
[0449] aaaaa. a VH comprising an HCDR1, an HCDR2, and an HCDR3 having an amino acid sequence of SEQ ID NOs:1212, 1213, and 1214, respectively, and a VL comprising an LCDR1, an LCDR2, and an LCDR3 having an amino acid sequence of SEQ ID NOs:1215, 1216, and 1217, respectively.

[0450] In some embodiments, antibody or antigen binding fragment thereof of is provided comprising:
[0451] a. a VH comprising the amino acid sequence of SEQ ID NO:138, and a VL comprising the amino acid sequence of SEQ ID NO:139;
[0452] b. a VH comprising the amino acid sequence of SEQ ID NO:142, and a VL comprising the amino acid sequence of SEQ ID NO:143;
[0453] c. a VH comprising the amino acid sequence of SEQ ID NO:144, and a VL comprising the amino acid sequence of SEQ ID NO:145;
[0454] d. a VH comprising the amino acid sequence of SEQ ID NO:148, and a VL comprising the amino acid sequence of SEQ ID NO:149;
[0455] e. a VH comprising the amino acid sequence of SEQ ID NO:150, and a VL comprising the amino acid sequence of SEQ ID NO:151;
[0456] f. a VH comprising the amino acid sequence of SEQ ID NO:152, and a VL comprising the amino acid sequence of SEQ ID NO:153;
[0457] g. a VH comprising the amino acid sequence of SEQ ID NO:154, and a VL comprising the amino acid sequence of SEQ ID NO:155;
[0458] h. a VH comprising the amino acid sequence of SEQ ID NO:156, and a VL comprising the amino acid sequence of SEQ ID NO:157;
[0459] i. a VH comprising the amino acid sequence of SEQ ID NO:158, and a VL comprising the amino acid sequence of SEQ ID NO:159;
[0460] j. a VH comprising the amino acid sequence of SEQ ID NO:160, and a VL comprising the amino acid sequence of SEQ ID NO:161;
[0461] k. a VH comprising the amino acid sequence of SEQ ID NO:162, and a VL comprising the amino acid sequence of SEQ ID NO:163;
[0462] l. a VH comprising the amino acid sequence of SEQ ID NO:164, and a VL comprising the amino acid sequence of SEQ ID NO:165;
[0463] m. a VH comprising the amino acid sequence of SEQ ID NO:166, and a VL comprising the amino acid sequence of SEQ ID NO:167;
[0464] n. a VH comprising the amino acid sequence of SEQ ID NO:168, and a VL comprising the amino acid sequence of SEQ ID NO:169;
[0465] o. a VH comprising the amino acid sequence of SEQ ID NO:170, and a VL comprising the amino acid sequence of SEQ ID NO:171;
[0466] p. a VH comprising the amino acid sequence of SEQ ID NO:172, and a VL comprising the amino acid sequence of SEQ ID NO:173;
[0467] q. a VH comprising the amino acid sequence of SEQ ID NO:174, and a VL comprising the amino acid sequence of SEQ ID NO:175;
[0468] r. a VH comprising the amino acid sequence of SEQ ID NO:176, and a VL comprising the amino acid sequence of SEQ ID NO:177;
[0469] s. a VH comprising the amino acid sequence of SEQ ID NO:178, and a VL comprising the amino acid sequence of SEQ ID NO:179;
[0470] t. a VH comprising the amino acid sequence of SEQ ID NO:180, and a VL comprising the amino acid sequence of SEQ ID NO:181;
[0471] u. a VH comprising the amino acid sequence of SEQ ID NO:182, and a VL comprising the amino acid sequence of SEQ ID NO:183;
[0472] v. a VH comprising the amino acid sequence of SEQ ID NO:186, and a VL comprising the amino acid sequence of SEQ ID NO:187;
[0473] w. a VH comprising the amino acid sequence of SEQ ID NO:188, and a VL comprising the amino acid sequence of SEQ ID NO:189;
[0474] x. a VH comprising the amino acid sequence of SEQ ID NO:190, and a VL comprising the amino acid sequence of SEQ ID NO:191;
[0475] y. a VH comprising the amino acid sequence of SEQ ID NO:192, and a VL comprising the amino acid sequence of SEQ ID NO:193;
[0476] z. a VH comprising the amino acid sequence of SEQ ID NO:194, and a VL comprising the amino acid sequence of SEQ ID NO:195;
[0477] aa. a VH comprising the amino acid sequence of SEQ ID NO:196, and a VL comprising the amino acid sequence of SEQ ID NO:197;
[0478] bb. a VH comprising the amino acid sequence of SEQ ID NO:198, and a VL comprising the amino acid sequence of SEQ ID NO:199;
[0479] cc. a VH comprising the amino acid sequence of SEQ ID NO:200, and a VL comprising the amino acid sequence of SEQ ID NO:201;
[0480] dd. a VH comprising the amino acid sequence of SEQ ID NO:202, and a VL comprising the amino acid sequence of SEQ ID NO:203;
[0481] ee. a VH comprising the amino acid sequence of SEQ ID NO:204, and a VL comprising the amino acid sequence of SEQ ID NO:205;
[0482] ff. a VH comprising the amino acid sequence of SEQ ID NO:206, and a VL comprising the amino acid sequence of SEQ ID NO:207;
[0483] gg. a VH comprising the amino acid sequence of SEQ ID NO:208, and a VL comprising the amino acid sequence of SEQ ID NO:209;
[0484] hh. a VH comprising the amino acid sequence of SEQ ID NO:210, and a VL comprising the amino acid sequence of SEQ ID NO:211;
[0485] ii. a VH comprising the amino acid sequence of SEQ ID NO:212, and a VL comprising the amino acid sequence of SEQ ID NO:213;
[0486] jj. a VH comprising the amino acid sequence of SEQ ID NO:214, and a VL comprising the amino acid sequence of SEQ ID NO:215;
[0487] kk. a VH comprising the amino acid sequence of SEQ ID NO:216, and a VL comprising the amino acid sequence of SEQ ID NO:217;
[0488] ll. a VH comprising the amino acid sequence of SEQ ID NO:218, and a VL comprising the amino acid sequence of SEQ ID NO:219;
[0489] mm. a VH comprising the amino acid sequence of SEQ ID NO:220, and a VL comprising the amino acid sequence of SEQ ID NO:221;
[0490] nn. a VH comprising the amino acid sequence of SEQ ID NO:222, and a VL comprising the amino acid sequence of SEQ ID NO:223;
[0491] oo. a VH comprising the amino acid sequence of SEQ ID NO:226, and a VL comprising the amino acid sequence of SEQ ID NO:227;
[0492] pp. a VH comprising the amino acid sequence of SEQ ID NO:228, and a VL comprising the amino acid sequence of SEQ ID NO:229;
[0493] qq. a VH comprising the amino acid sequence of SEQ ID NO:230, and a VL comprising the amino acid sequence of SEQ ID NO:231;
[0494] rr. a VH comprising the amino acid sequence of SEQ ID NO:232, and a VL comprising the amino acid sequence of SEQ ID NO:233;
[0495] ss. a VH comprising the amino acid sequence of SEQ ID NO:234, and a VL comprising the amino acid sequence of SEQ ID NO:235;
[0496] tt. a VH comprising the amino acid sequence of SEQ ID NO:236, and a VL comprising the amino acid sequence of SEQ ID NO:237;
[0497] uu. a VH comprising the amino acid sequence of SEQ ID NO:238, and a VL comprising the amino acid sequence of SEQ ID NO:239;
[0498] vv. a VH comprising the amino acid sequence of SEQ ID NO:240, and a VL comprising the amino acid sequence of SEQ ID NO:241;
[0499] ww. a VH comprising the amino acid sequence of SEQ ID NO:246, and a VL comprising the amino acid sequence of SEQ ID NO:247;
[0500] xx. a VH comprising the amino acid sequence of SEQ ID NO:248, and a VL comprising the amino acid sequence of SEQ ID NO:249;
[0501] yy. a VH comprising the amino acid sequence of SEQ ID NO:250, and a VL comprising the amino acid sequence of SEQ ID NO:251;
[0502] zz. a VH comprising the amino acid sequence of SEQ ID NO:252, and a VL comprising the amino acid sequence of SEQ ID NO:253;
[0503] aaa. a VH comprising the amino acid sequence of SEQ ID NO:254, and a VL comprising the amino acid sequence of SEQ ID NO:255;
[0504] bbb. a VH comprising the amino acid sequence of SEQ ID NO:256, and a VL comprising the amino acid sequence of SEQ ID NO:257;
[0505] ccc. a VH comprising the amino acid sequence of SEQ ID NO:258, and a VL comprising the amino acid sequence of SEQ ID NO:259;
[0506] ddd. a VH comprising the amino acid sequence of SEQ ID NO:260, and a VL comprising the amino acid sequence of SEQ ID NO:261;
[0507] eee. a VH comprising the amino acid sequence of SEQ ID NO:262, and a VL comprising the amino acid sequence of SEQ ID NO:263;
[0508] fff. a VH comprising the amino acid sequence of SEQ ID NO:264, and a VL comprising the amino acid sequence of SEQ ID NO:265;
[0509] ggg. a VH comprising the amino acid sequence of SEQ ID NO:268, and a VL comprising the amino acid sequence of SEQ ID NO:269;
[0510] hhh. a VH comprising the amino acid sequence of SEQ ID NO:786, and a VL comprising the amino acid sequence of SEQ ID NO:787;
[0511] iii. a VH comprising the amino acid sequence of SEQ ID NO:788, and a VL comprising the amino acid sequence of SEQ ID NO:789;
[0512] jjj. a VH comprising the amino acid sequence of SEQ ID NO:790, and a VL comprising the amino acid sequence of SEQ ID NO:791;
[0513] kkk. a VH comprising the amino acid sequence of SEQ ID NO:792, and a VL comprising the amino acid sequence of SEQ ID NO:793;
[0514] lll. a VH comprising the amino acid sequence of SEQ ID NO:798, and a VL comprising the amino acid sequence of SEQ ID NO:799;
[0515] mmm. a VH comprising the amino acid sequence of SEQ ID NO:806, and a VL comprising the amino acid sequence of SEQ ID NO:807;
[0516] nnn. a VH comprising the amino acid sequence of SEQ ID NO:808, and a VL comprising the amino acid sequence of SEQ ID NO:809;
[0517] ooo. a VH comprising the amino acid sequence of SEQ ID NO:810, and a VL comprising the amino acid sequence of SEQ ID NO:811;
[0518] ppp. a VH comprising the amino acid sequence of SEQ ID NO:812, and a VL comprising the amino acid sequence of SEQ ID NO:813;
[0519] qqq. a VH comprising the amino acid sequence of SEQ ID NO:814, and a VL comprising the amino acid sequence of SEQ ID NO:815;
[0520] rrr. a VH comprising the amino acid sequence of SEQ ID NO:816, and a VL comprising the amino acid sequence of SEQ ID NO:817;
[0521] sss. a VH comprising the amino acid sequence of SEQ ID NO:818, and a VL comprising the amino acid sequence of SEQ ID NO:819;
[0522] ttt. a VH comprising the amino acid sequence of SEQ ID NO:820, and a VL comprising the amino acid sequence of SEQ ID NO:821;
[0523] uuu. a VH comprising the amino acid sequence of SEQ ID NO:822, and a VL comprising the amino acid sequence of SEQ ID NO:823;
[0524] vvv. a VH comprising the amino acid sequence of SEQ ID NO:824, and a VL comprising the amino acid sequence of SEQ ID NO:825;
[0525] www. a VH comprising the amino acid sequence of SEQ ID NO:826, and a VL comprising the amino acid sequence of SEQ ID NO:827;
[0526] xxx. a VH comprising the amino acid sequence of SEQ ID NO:828, and a VL comprising the amino acid sequence of SEQ ID NO:829;
[0527] yyy. a VH comprising the amino acid sequence of SEQ ID NO:830, and a VL comprising the amino acid sequence of SEQ ID NO:831;
[0528] zzz. a VH comprising the amino acid sequence of SEQ ID NO:832, and a VL comprising the amino acid sequence of SEQ ID NO:833;
[0529] aaaa. a VH comprising the amino acid sequence of SEQ ID NO:836, and a VL comprising the amino acid sequence of SEQ ID NO:837;
[0530] bbbb. a VH comprising the amino acid sequence of SEQ ID NO:838, and a VL comprising the amino acid sequence of SEQ ID NO:839;
[0531] cccc. a VH comprising the amino acid sequence of SEQ ID NO:840, and a VL comprising the amino acid sequence of SEQ ID NO:841;
[0532] dddd. a VH comprising the amino acid sequence of SEQ ID NO: 842, and a VL comprising the amino acid sequence of SEQ ID NO:843;
[0533] eeee. a VH comprising the amino acid sequence of SEQ ID NO:846, and a VL comprising the amino acid sequence of SEQ ID NO:847;
[0534] ffff. a VH comprising the amino acid sequence of SEQ ID NO:848, and a VL comprising the amino acid sequence of SEQ ID NO:849;
[0535] gggg. a VH comprising the amino acid sequence of SEQ ID NO:850, and a VL comprising the amino acid sequence of SEQ ID NO:851;
[0536] hhhh. a VH comprising the amino acid sequence of SEQ ID NO:852, and a VL comprising the amino acid sequence of SEQ ID NO:853;
[0537] iiii. a VH comprising the amino acid sequence of SEQ ID NO:854, and a VL comprising the amino acid sequence of SEQ ID NO:855;
[0538] jjjj. a VH comprising the amino acid sequence of SEQ ID NO:856, and a VL comprising the amino acid sequence of SEQ ID NO:857;
[0539] kkkk. a VH comprising the amino acid sequence of SEQ ID NO:858, and a VL comprising the amino acid sequence of SEQ ID NO:859;
[0540] llll. a VH comprising the amino acid sequence of SEQ ID NO:860, and a VL comprising the amino acid sequence of SEQ ID NO:861;
[0541] mmmm. a VH comprising the amino acid sequence of SEQ ID NO:862, and a VL comprising the amino acid sequence of SEQ ID NO:863;
[0542] nnnn. a VH comprising the amino acid sequence of SEQ ID NO:864, and a VL comprising the amino acid sequence of SEQ ID NO:865;
[0543] oooo. a VH comprising the amino acid sequence of SEQ ID NO:866, and a VL comprising the amino acid sequence of SEQ ID NO:867;
[0544] pppp. a VH comprising the amino acid sequence of SEQ ID NO:868, and a VL comprising the amino acid sequence of SEQ ID NO:869;
[0545] qqqq. a VH comprising the amino acid sequence of SEQ ID NO:870, and a VL comprising the amino acid sequence of SEQ ID NO:871;
[0546] rrrr. a VH comprising the amino acid sequence of SEQ ID NO:872, and a VL comprising the amino acid sequence of SEQ ID NO:873;
[0547] ssss. a VH comprising the amino acid sequence of SEQ ID NO:874, and a VL comprising the amino acid sequence of SEQ ID NO:875;
[0548] tttt. a VH comprising the amino acid sequence of SEQ ID NO:876, and a VL comprising the amino acid sequence of SEQ ID NO:877;
[0549] uuuu. a VH comprising the amino acid sequence of SEQ ID NO:878, and a VL comprising the amino acid sequence of SEQ ID NO:879;
[0550] vvvv. a VH comprising the amino acid sequence of SEQ ID NO:880, and a VL comprising the amino acid sequence of SEQ ID NO:881;
[0551] wwww. a VH comprising the amino acid sequence of SEQ ID NO:882, and a VL comprising the amino acid sequence of SEQ ID NO:883;
[0552] xxxx. a VH comprising the amino acid sequence of SEQ ID NO:884, and a VL comprising the amino acid sequence of SEQ ID NO:885;
[0553] yyyy. a VH comprising the amino acid sequence of SEQ ID NO:886, and a VL comprising the amino acid sequence of SEQ ID NO:887;
[0554] zzzz. a VH comprising the amino acid sequence of SEQ ID NO:888, and a VL comprising the amino acid sequence of SEQ ID NO:889; or
[0555] aaaaa. a VH comprising the amino acid sequence of SEQ ID NO:890, and a VL comprising the amino acid sequence of SEQ ID NO:891.

[0556] In some embodiments, the antibody or antigen bidnimng fragment thereof provided herein is genetically fused or chemically conjugated to an agent. The agent may be a detectable substance or a drug. The agent may be a functional label or a detectable label. In some embodiments, the antibody is genetically fused or chemically conjugated to an agent,
[0557] wherein optionally the agent a detectable substance or is a drug,
[0558] wherein optionally the detectable substance is selected from enzymes, prosthetic groups, fluorescent materials, luminescent materials, bioluminescent materials or chemiluminescent materials,
[0559] wherein optionally the enzymes are selected from horseradish peroxidase, alkaline phosphatase, beta-galactosidase, or acetylcholinesterase;
[0560] wherein optionally the prosthetic groups are selected from streptavidin/biotin or avidin/biotin;
[0561] wherein optionally the fluorescent materials are selected from umbelliferone, fluorescein, fluorescein isothiocynate, rhodamine, dichlorotriazinylamine fluorescein, dansyl chloride, or phycoerythrin;
[0562] wherein optionally the luminescent material is luminol;
[0563] wherein optionally the bioluminescent materials are selected from luciferase, luciferin, or aequorin; and
[0564] wherein optionally the chemiluminescent materials are selected from 225 Acγ-emitting, Auger-emitting, β-emitting, an alpha-emitting or positron-emitting radioactive isotope.

[0565] In some embodiments, the antibody provided herein is an IgG.

[0566] In some embodiments, the antibody provided herein is a humanized antibody. In some embodiments, the antibody provided herein is a humanized antibody or a fragment thereof, particularly an antigen binding fragment therof. In some embodiments, the antibody provided herein is a chimeric or chimerized antibody. In some embodiments, the antibody provided herein is a chimeric or chimerized antibody or a fragment thereof, particularly an antigen binding fragment thereof. In some embodiments, the antibody is in the form of an antibody F(ab′)2, scFv fragment, domain antibody, minibody, diabody, triabody or tetrabody.In some embodiments, the antibody provided herein is genetically fused or chemically conjugated to an agent. In some embodiments, the agent is a drug. In some embodiments, the agent a detectable substance. In some embodiments, the detectable substance is selected from enzymes, prosthetic groups, fluorescent materials, luminescent materials, bioluminescent materials or chemiluminescent materials. In some embodiments, the enzymes are selected from horseradish peroxidase, alkaline phosphatase, beta-galactosidase, or acetylcholinesterase. In some embodiments, the prosthetic groups are selected from streptavidin/biotin or avidin/biotin. In some embodiments, the fluorescent materials are selected from umbelliferone, fluorescein, fluorescein isothiocynate, rhodamine, dichlorotriazinylamine fluorescein, dansyl chloride, or phycoerythrin. In some embodiments, the luminescent material is luminol. In some embodiments, the bioluminescent materials are selected from luciferase, luciferin, or aequorin. In some embodiments, the chemiluminescent materials are selected from 225 Acγ-emitting, Auger-emitting, β-emitting, an alpha-emitting or positron-emitting radioactive isotope.

[0567] In another aspect, provided herein is a nucleic acid molecule encoding the antibody provided herein. In an embodiment, herein is provided nucleic acid molecule encoding any antibody or antigen binding fragment thereof as described herein. The nucleic acid may encode one antibody or fragment thereof. The nucleic acid may encode one or more or two or more antibodies or fragments thereof. The nucleic acid may encode a heavy chain or a light chain of an antibody. The nucleic acid may encode a heavy chain or a light chain of an antibody or fragment thereof. The nucleic acid may encode a heavy chain and a light chain of an antibody. The nucleic acid may encode a VHH antibody.

[0568] In another aspect, provided herein is a vector comprising the nucleic acid molecule provided herein.

[0569] In another aspect, provided herein is a host cell transformed with the vector provided herein.

[0570] Compositions comprising the antibody(ies) or active fragment(s) thereof are further provided, particularly further comprising a pharmaceutical excipient. In some embodiments, a composition is provided comprising the antibody or fragment thereof. In some embodiments, a composition is provided comprising the nucleic acid. In some embodiments, a composition is provided comprising a vector, and a pharmaceutically acceptable excipient. In another aspect, provided herein is a composition comprising the antibody provided herein, the nucleic acid molecule provided herein, or the vector provided herein, and a pharmaceutically acceptable excipient.

[0571] In another aspect, provided herein is a kit comprising the antibody provided herein.

[0572] In another aspect, provided herein is a method for detecting, selecting and/or enriching IL-23R in a sample comprising contacting the sample with the antibody provided herein. In some embodiments, the method comprises using the antibody provided herein in an immunohistochemistry (IHC) assay, an immunocytochemistry (ICC) assay, an immunoblotting assay, an immunoprecipitation assay, a flow cytometry assay, an ELISA, a radioimmunoassay, a mass spectrometry assay, or high throughput screening assay. In some embodiments, the method comprises using the antibody provided herein in a AbSeq/CITESeq assay. In some embodiments, the method comprises using the antibody provided herein in a proximity ligation assay. In some embodiments, method comprises using the antibody provided herein in an ELISA or other immunoassay. In some embodiments, the flow cytometry assay comprises three-steps of staining: (1) first, incubating the sample with the antibody provided herein; (2) second, incubating the sample with biotinylated anti-mouse IgG₂ₐ; (3) third, incubating the sample with streptavidin-PE. In some embodiments, to establish the background for the flow cytometry assay, cells incubated with buffer alone or the negative control antibody are used as a control group in step (1), and cells incubated without the biotinylated anti-mouse IgG₂ₐ secondary reagent are used as an additional control group in step (2).

[0573] In another aspect, provided herein is a method for detecting, selecting and/or enriching IL-23R in a sample comprising contacting the sample with an antibody that binds to the same epitope as the antibody provided herein, or an antibody that binds IL-23R competitively with the antibody provided herein.

[0574] In some embodiments, the method provided herein comprising contacting the sample with an antibody that binds to the same epitope and/or binds IL-23R competitively with the antibody comprising:
[0575] a. a VH comprising the amino acid sequence of SEQ ID NO:202 and a VL comprising the amino acid sequence of SEQ ID NO:203;
[0576] b. a VH comprising the amino acid sequence of SEQ ID NO:252 and a VL comprising the amino acid sequence of SEQ ID NO:253; or
[0577] c. a VH comprising the amino acid sequence of SEQ ID NO:156 and a VL comprising the amino acid sequence of SEQ ID NO:157.

[0578] In some embodiments, the method provided herein comprising contacting the sample with an antibody that binds to the same epitope and/or binds IL-23R competitively with the antibody comprising:
[0579] a. a VH comprising the amino acid sequence of SEQ ID NO:192 and a VL comprising the amino acid sequence of SEQ ID NO:193;
[0580] b. a VH comprising the amino acid sequence of SEQ ID NO:194 and a VL comprising the amino acid sequence of SEQ ID NO:195;
[0581] c. a VH comprising the amino acid sequence of SEQ ID NO:200 and a VL comprising the amino acid sequence of SEQ ID NO:201;
[0582] d. a VH comprising the amino acid sequence of SEQ ID NO:218 and a VL comprising the amino acid sequence of SEQ ID NO:219;
[0583] e. a VH comprising the amino acid sequence of SEQ ID NO:222 and a VL comprising the amino acid sequence of SEQ ID NO:223;
[0584] f. a VH comprising the amino acid sequence of SEQ ID NO:260 and a VL comprising the amino acid sequence of SEQ ID NO:261;
[0585] g. a VH comprising the amino acid sequence of SEQ ID NO:264 and a VL comprising the amino acid sequence of SEQ ID NO:265;
[0586] h. a VH comprising the amino acid sequence of SEQ ID NO:154 and a VL comprising the amino acid sequence of SEQ ID NO:155;
[0587] i. a VH comprising the amino acid sequence of SEQ ID NO:160 and a VL comprising the amino acid sequence of SEQ ID NO:161; or
[0588] j. a VH comprising the amino acid sequence of SEQ ID NO:164 and a VL comprising the amino acid sequence of SEQ ID NO:165.

[0589] In some embodiments, the method provided herein comprising contacting the sample with an antibody that binds to the same epitope and/or binds IL-23R competitively with the antibody comprising:
[0590] a. a VH comprising the amino acid sequence of SEQ ID NO:786 and a VL comprising the amino acid sequence of SEQ ID NO:787;
[0591] b. a VH comprising the amino acid sequence of SEQ ID NO:790 and a VL comprising the amino acid sequence of SEQ ID NO:791;
[0592] c. a VH comprising the amino acid sequence of SEQ ID NO:792 and a VL comprising the amino acid sequence of SEQ ID NO:793;
[0593] d. a VH comprising the amino acid sequence of SEQ ID NO:236 and a VL comprising the amino acid sequence of SEQ ID NO:237;
[0594] e. a VH comprising the amino acid sequence of SEQ ID NO:826 and a VL comprising the amino acid sequence of SEQ ID NO:827; or
[0595] f. a VH comprising the amino acid sequence of SEQ ID NO:828 and a VL comprising the amino acid sequence of SEQ ID NO:829.

[0596] In some embodiments, the method provided herein comprising contacting the sample with an antibody that binds to the same epitope and/or binds IL-23R competitively with the antibody comprising:
[0597] a. a VH comprising the amino acid sequence of SEQ ID NO:196 and a VL comprising the amino acid sequence of SEQ ID NO:197;
[0598] b. a VH comprising the amino acid sequence of SEQ ID NO:262 and a VL comprising the amino acid sequence of SEQ ID NO:263; or
[0599] c. a VH comprising the amino acid sequence of SEQ ID NO:152 and a VL comprising the amino acid sequence of SEQ ID NO:153.

[0600] In some embodiments, the method provided herein, comprising contacting the sample with an antibody that binds to the same epitope and/or binds IL-23R competitively with the antibody comprising: a VH comprising the amino acid sequence of SEQ ID NO:798 and a VL comprising the amino acid sequence of SEQ ID NO:799.

[0601] In some embodiments, the method provided herein comprising contacting the sample with an antibody that binds to the same epitope and/or binds IL-23R competitively with the antibody comprising:
[0602] a. a VH comprising the amino acid sequence of SEQ ID NO:206 and a VL comprising the amino acid sequence of SEQ ID NO:207;
[0603] b. a VH comprising the amino acid sequence of SEQ ID NO:250 and a VL comprising the amino acid sequence of SEQ ID NO:251;
[0604] c. a VH comprising the amino acid sequence of SEQ ID NO:144 and a VL comprising the amino acid sequence of SEQ ID NO:145; or
[0605] d. a VH comprising the amino acid sequence of SEQ ID NO:170 and a VL comprising the amino acid sequence of SEQ ID NO:171.

[0606] In some embodiments, the method provided herein comprising contacting the sample with an antibody that binds to the same epitope and/or binds IL-23R competitively with the antibody comprising: a VH comprising the amino acid sequence of SEQ ID NO:150 and a VL comprising the amino acid sequence of SEQ ID NO:151.

[0607] In some embodiments, the method provided herein comprising contacting the sample with an antibody that binds to the same epitope and/or binds IL-23R competitively with the antibody comprising:
[0608] a. a VH comprising the amino acid sequence of SEQ ID NO:198 and a VL comprising the amino acid sequence of SEQ ID NO:199; or
[0609] b. a VH comprising the amino acid sequence of SEQ ID NO:240 and a VL comprising the amino acid sequence of SEQ ID NO:241.

[0610] In some embodiments, the method provided herein comprising contacting the sample with an antibody that binds to the same epitope and/or binds IL-23R competitively with the antibody comprising:
[0611] a. a VH comprising the amino acid sequence of SEQ ID NO:204 and a VL comprising the amino acid sequence of SEQ ID NO:205; or
[0612] b. a VH comprising the amino acid sequence of SEQ ID NO:884 and a VL comprising the amino acid sequence of SEQ ID NO:885.

[0613] In some embodiments, the method provided herein is for detecting, selecting and/or enriching human IL-23R.

[0614] In some embodiments, the method provided herein is for detecting, selecting and/or enriching cells that express IL-23R.

[0615] In some embodiments, the method provided herein is for detecting denatured IL-23R.

[0616] In some embodiments, the method provided herein comprising contacting the sample with two or more antibodies each being the antibody provided herein. In some embodiments, the two or more antibodies bind to different epitopes of IL-23R. In some embodiments, the sample is from a human subject. In some embodiments, the human subject has a disease or disorder. In some embodiments, the disease or disorder is an IL-23R associated disease or disorder. In some embodiments, the human subject is a healthy human subject.

[0617] In another aspect, provided herein is a method of antagonizing or inhibiting IL-23R in a cell comprising contacting the cell with the antibody provided herein.

[0618] In another aspect, provided herein is a method of treating a disease or disorder in a subject, comprising administering to the subject the composition provided herein. In some embodiments, the disease or disorder is an IL-23R associated disease or disorder.

[0619] In an aspect, provided herein is a method of antagonizing or inhibiting IL-23R in a cell comprising contacting the cell with an antibody or antigen binding fragment thereof described herein.

[0620] In an aspect, provided herein is a method of treating a disease or disorder in a subject, comprising administering to the subject the composition hereof.

[0621] In accordance with the methods herein, the disease or disorder may an IL-23R associated disease or disorder. In some embodiments, the disease or disorder is associated with inflammatory, autoimmune inflammation diseases and/or related disorders. In some embodiments, the disease or disorder associated with inflammatory, autoimmune inflammation diseases and/or related disorders is selected from multiple sclerosis, asthma, rheumatoid arthritis, inflammation of the gut, inflammatory bowel diseases (IBDs), juvenile IBD, adolescent IBD, Crohn's disease, ulcerative colitis, Celiac disease (nontropical Sprue), microscopic colitis, collagenous colitis, eosinophilic gastroenteritis/esophagitis, colitis associated with radio- or chemo-therapy, colitis associated with disorders of innate immunity as in leukocyte adhesion deficiency-1, sarcoidosis, Systemic Lupus Erythematosus, ankylosing spondylitis (axial spondyloarthritis), psoriatic arthritis, psoriasis (e.g., plaque psoriasis, guttate psoriasis, inverse psoriasis, pustular psoriasis, Palmo-Plantar Pustulosis, psoriasis vulgaris, or erythrodermic psoriasis), atopic dermatitis, acne ectopica, enteropathy associated with seronegative arthropathies, chronic granulomatous disease, glycogen storage disease type 1b, Hermansky-Pudlak syndrome, Chediak-Higashi syndrome, Wiskott-Aldrich Syndrome, pouchitis, pouchitis resulting after proctocolectomy and ileoanal anastomosis, gastrointestinal cancer, pancreatitis, insulin-dependent diabetes mellitus, mastitis, cholecystitis, cholangitis, primary biliary cirrhosis, viral-associated enteropathy, pericholangitis, chronic bronchitis, chronic sinusitis, asthma, uveitis, or graft versus host disease.

[0622] In some embodiments, the disease or disorder is associated with an autoimmune disease is selected from Ulcerative colitis (UC), Crohn's Disease (CD), psoriasis (PsO), or psoriatic arthritis (PsA).

### BRIEF DESCRIPTION OF THE FIGURES

[0623] FIG. 1 Representative polyclonal phage ELISA. Phage panning experiment XP37 showed enrichment of IL-23R binding starting at round 4 (R4).

[0624] FIG. 2 Representative monoclonal Fab ELISA for primary screening. Many monoclonal Fabs from XP37 round 5 (R5) show binding to IL-23R ECD but not to mouse IL-6. A mouse IL-6 binding Fab is used as a positive control for mouse IL-6 protein binding.

[0625] FIG. 3 IL-23 responsiveness of peripheral blood mononuclear cells (PBMCs) from 3 human donors. PBMCs from 3 donors were cultured on anti-CD3-coated flasks in serum-free medium supplemented with 100 ng/mL IL-1p. On day 4, cells were transferred to RPMI-1640 supplemented with 0.1% BSA for >4 hours and then stimulated with a serial titration of IL-23. Phosphorylated STAT3 was measured in cell lysates by Meso Scale Discovery (MSD). Each point represents the mean (±SD) of duplicate points.

[0626] FIG. 4 PBMC flow cytometry gating strategy and demonstration of lack of background binding with second- and third-step detection reagents. PBMCs were cultured on anti-CD3-coated flasks in serum-free medium supplemented with 100 ng/mL IL-13. On day 4, cells were stained with a viability dye in the presence of FcR blocking reagent and then incubated with 10 μg/mL anti-IL-23R or buffer alone for 60 minutes on ice. Cells were washed and incubated with biotinylated anti-mouse IgG₂ₐ or buffer alone for 30 minutes on ice. After a second wash, cells were incubated with SAV-PE and FITC-anti-human CD3, PE-Vio770-anti-human CD56, and APC-anti-human CD8. Cells were acquired on a FACSCanto cell analyzer, and data were analyzed using FlowJo software. (A) Gating strategy to identify live, single CD3+CD56⁻ T cells, CD3+CD56+ cells, and CD3⁻ CD56+ cells. PE vs CD8-APC in the absence of primary anti-IL-23R mAb (B), absence of primary anti-IL-23R mAb and secondary biotinylated anti-mouse IgG₂ₐ (C), or after staining with the negative control mAb, I23RB5, in the presence (D) or absence (E) of secondary biotinylated anti-mouse IgG₂ₐ.

[0627] FIG. 5 IL-23R detection by IL-23R mAbs from the same experiment shown in FIG. 4. The indicated phage display-derived anti-human IL-23R mAbs were tested and results are shown particularly for antibodies I23RB5, I23RB1, I23RB2, I23RB3, I23RB4 and I23RB7. IL-23R vs CD8 staining on gated CD3+CD56⁻ T cells (A), CD3+CD56+ cells (B), and CD3⁻ CD56+ cells (C).

[0628] FIG. 6 IL-23R detection by IL-23R mAbs on primary CD3+CD56⁻ T cells. IL-23R mAbs derived from immunizing mice with the human IL-23R extracellular domain were tested for flow cytometric detection of IL-23R expression by PBMCs stimulated for 4 days with anti-CD3 and IL-1β. IL-23R vs CD8 staining on gated CD3+CD56⁻ T cells is shown. (A) 123RB101 showed no binding over background staining. (B) I23RB42 and I23RB157 compete for IL-23R ECD protein binding and belong to epitope bin 1 (Table 11). I23RB157 showed no binding over background staining. (C) I23RB32, I23RB33, I23RB47, I23RB65, I23RB92, and I23RB94 belong to bin 2. (D) I23RB1, I23RB3, I23RB4, and I23RB76 belong to bin 3. (E) I23RB35 belongs to bin 4. (F) I23RB7 (and I23RB47 shown in part C) belong to bin 5. *Note that I23RB47 fell into bins 2 and 5.

[0629] FIG. 7 Expression knockdown by IL23R siRNA specifically reduces binding of IL-23R mAbs. PBMCs were cultured on anti-CD3-coated flasks in serum-free medium supplemented with 100 ng/mL IL-1β. On day 3, cells were electroporated with siRNA targeting the IL23R transcript or a negative control siRNA. After electroporation, the cells were cultured in serum-free medium on anti-CD3-coated flasks for an additional ˜24 hours. At that time, cells were pelleted for RNA isolation and real-time PCR analysis of IL23R and IL12RB1 transcript levels or stained for surface IL-23R and IL-12Rβ1. (A) Relative IL23R and IL12RB1 transcript levels in control and IL23R siRNA-electroporated PBMCs. (B) Gating strategy to identify live, single CD4+ and CD8+CD3+CD56⁻ T cells. (C) I23RB4, I23RB7, or I23RB76 (unfilled histograms) or I23RB5 (shaded histograms) staining on control (red) or IL23R (blue) siRNA-electroporated cells. (D) IL-12Rβ1 (unfilled histograms) or fluorescence minus one (FMO) (shaded histograms) staining on control (red) or IL23R (blue) siRNA-electroporated cells.

### DETAILED DESCRIPTION

[0630] The present disclosure is based in part on the surprisingly superior properties of the anti-IL-23R antibodies provided herein for detecting and/or measuring IL-23R in primary cells and native tissues as well as native and recombinant cell lines by various assays among other advantages.

[0631] In 2011, a proprietary anti-human IL-23R mAb was briefly described by Pidasheva et al. (PLoS One 6: e25038, 2011) in their study of the R381Q variant of the IL-23 receptor. Later, in 2017, Wines et al. (Immunol Cell Biol 95: 272-279, 2017) described three anti-human IL-23R monoclonal antibodies (mAbs) that, when combined in a single staining cocktail, were able to detect IL-23R on the surface of cultured Th17 and Th17/1 cell lines. Two of the mAbs additionally detected IL-23R on the surface of freshly isolated and cultured γδ T cells (Wines et al., 2017). Aside from these reagents, anti-IL-23R mAbs reported to detect IL-23R by flow cytometry are commercially available from R&D Systems (FAB14001, which is the same clone as MAB14001 but in labeled form) and abcam (ab222104). However, the experiments described in this application have shown that these commercial antibodies bind weakly to the IL-23R extracellular domain (ECD).

[0632] In this application, we describe the discovery and characterization of novel anti-human IL-23R antibodies validated for flow cytometric detection of IL-23R on the surface of primary human CD3+CD56⁻ T cells. Also, novel anti-IL-23R antibodies are described and characterized that bind human IL-23R and also rat IL-23R. These mAbs have a range of affinities, recognize multiple distinct epitopes on the IL-23R extracellular domain, and have the potential for use in applications beyond flow cytometry, including, but not limited to, receptor occupancy and target engagement assays, immunohistochemistry (IHC), Western blot, and immunoprecipitation with primary cells and native tissues as well as with native and recombinant cell lines. These mAbs have the potential for use in applications including monitoring or modulating IL-23R activity and expression, including in primary cells and native tissues. Further, the antibodies have applications in monitoring or modulating IL-23R mediated signaling in vitro, in vivo and ex vivo. Other applications involving IL-23R mediated signaling and response include in IL-23R mediated and associated diseases and conditions in an animal, including in animal models, in disease assessment, and in treatment or alleviation of IL-23R mediated or associated diseases.

### Definitions

[0633] Techniques and procedures described or referenced herein include those that are generally well understood and/or commonly employed using conventional methodology by those skilled in the art, such as, for example, the widely utilized methodologies described in Sambrook et al., Molecular Cloning: A Laboratory Manual (3d ed. 2001); Current Protocols in Molecular Biology (Ausubel et al. eds., 2003); Therapeutic Monoclonal Antibodies: From Bench to Clinic (An ed. 2009); Monoclonal Antibodies: Methods and Protocols (Albitar ed. 2010); and Antibody Engineering Vols 1 and 2 (Kontermann and Dubel eds., 2d ed. 2010). Unless otherwise defined herein, technical and scientific terms used in the present description have the meanings that are commonly understood by those of ordinary skill in the art. For purposes of interpreting this specification, the following description of terms will apply and whenever appropriate, terms used in the singular will also include the plural and vice versa. In the event that any description of a term set forth conflicts with any document incorporated herein by reference, the description of the term set forth below shall control.

[0634] The term “antibody,” “immunoglobulin,” or “Ig” is used interchangeably herein, and is used in the broadest sense and specifically covers, for example, monoclonal antibodies (including agonist, antagonist, neutralizing antibodies, full length or intact monoclonal antibodies), antibody compositions with polyepitopic or monoepitopic specificity, polyclonal antibodies, monovalent antibodies, multivalent antibodies, multispecific antibodies (e.g., bispecific antibodies so long as they exhibit the desired biological activity), formed from at least two intact antibodies, single chain antibodies, and fragments thereof (e.g., domain antibodies), as described below. An antibody can be human, humanized, chimeric and/or affinity matured, as well as an antibody from other species, for example, mouse, rabbit, llama, etc. The term “antibody” is intended to include a polypeptide product of B cells within the immunoglobulin class of polypeptides that is able to bind to a specific molecular antigen and is composed of two identical pairs of polypeptide chains, wherein each pair has one heavy chain (about 50-70 kDa) and one light chain (about 25 kDa), each amino-terminal portion of each chain includes a variable region of about 100 to about 130 or more amino acids, and each carboxy-terminal portion of each chain includes a constant region. See, e.g., Antibody Engineering (Borrebaeck ed., 2d ed. 1995); and Kuby, Immunology (3d ed. 1997). Antibodies also include, but are not limited to, synthetic antibodies, recombinantly produced antibodies, antibodies including from Camelidae species (e.g., llama or alpaca) or their humanized variants, intrabodies, anti-idiotypic (anti-Id) antibodies, and functional fragments (e.g., antigen binding fragments) of any of the above, which refers to a portion of an antibody heavy or light chain polypeptide that retains some or all of the binding activity of the antibody from which the fragment was derived. Non-limiting examples of functional fragments (e.g., antigen binding fragments) include single-chain Fvs (scFv) (e.g., including monospecific, bispecific, etc.), Fab fragments, F(ab′) fragments, F(ab)₂ fragments, F(ab′)₂ fragments, disulfide-linked Fvs (dsFv), Fd fragments, Fv fragments, diabody, triabody, tetrabody, and minibody. In particular, antibodies provided herein include immunoglobulin molecules and immunologically active portions of immunoglobulin molecules, for example, antigen-binding domains or molecules that contain an antigen-binding site that binds to an antigen (e.g., one or more CDRs of an antibody). Such antibody fragments can be found in, for example, Harlow and Lane, Antibodies: A Laboratory Manual (1989); Mol. Biology and Biotechnology: A Comprehensive Desk Reference (Myers ed., 1995); Huston et al., 1993, Cell Biophysics 22:189-224; Pluckthun and Skerra, 1989, Meth. Enzymol. 178:497-515; and Day, Advanced Immunochemistry (2d ed. 1990). The antibodies provided herein can be of any class (e.g., IgG, IgE, IgM, IgD, and IgA) or any subclass (e.g., IgG1, IgG2, IgG3, IgG4, IgA1, and IgA2) of immunoglobulin molecule. Antibodies may be agonistic antibodies or antagonistic antibodies. Antibodies may be neither agonistic nor antagonistic.

[0635] An “antigen” is a structure to which an antibody can selectively bind. A target antigen may be a polypeptide, carbohydrate, nucleic acid, lipid, hapten, or other naturally occurring or synthetic compound. In some embodiments, the target antigen is a polypeptide. In certain embodiments, an antigen is associated with a cell, for example, is present on or in a cell.

[0636] An “intact” antibody is one comprising an antigen-binding site as well as a CL and at least heavy chain constant regions, CH1, CH2 and CH3. The constant regions may include human constant regions or amino acid sequence variants thereof. In certain embodiments, an intact antibody has one or more effector functions.

[0637] The terms “binds” or “binding” refer to an interaction between molecules including, for example, to form a complex. Interactions can be, for example, non-covalent interactions including hydrogen bonds, ionic bonds, hydrophobic interactions, and/or van der Waals interactions. A complex can also include the binding of two or more molecules held together by covalent or non-covalent bonds, interactions, or forces. The strength of the total non-covalent interactions between a single antigen-binding site on an antibody and a single epitope of a target molecule, such as an antigen, is the affinity of the antibody or functional fragment (antigen binding fragment) for that epitope. The ratio of dissociation rate (k_{off}) to association rate (kₒₙ) of a binding molecule (e.g., an antibody) to a monovalent antigen (k_{off}/kₒₙ) is the dissociation constant K_{D}, which is inversely related to affinity. The lower the K_{D} value, the higher the affinity of the antibody. The value of K_{D} varies for different complexes of antibody and antigen and depends on both kₒₙ and k_{off}. The dissociation constant K_{D} for an antibody provided herein can be determined using any method provided herein or any other method well known to those skilled in the art. The affinity at one binding site does not always reflect the true strength of the interaction between an antibody and an antigen. When complex antigens containing multiple, repeating antigenic determinants, such as a polyvalent antigen, come in contact with antibodies containing multiple binding sites, the interaction of antibody with antigen at one site will increase the probability of a reaction at a second site. The strength of such multiple interactions between a multivalent antibody and antigen is called the avidity.

[0638] In connection with the binding molecules described herein terms such as “bind to,” “that specifically bind to,” and analogous terms are also used interchangeably herein and refer to binding molecules of antigen binding domains that specifically bind to an antigen, such as a polypeptide. A binding molecule or antigen binding domain that binds to or specifically binds to an antigen can be identified, for example, by immunoassays, Octet®, Biacore®, or other techniques known to those of skill in the art. In some embodiments, a binding molecule or antigen binding domain binds to or specifically binds to an antigen when it binds to an antigen with higher affinity than to any cross-reactive antigen as determined using experimental techniques, such as radioimmunoassay (RIA) and enzyme linked immunosorbent assay (ELISA). Typically, a specific or selective reaction will be at least twice background signal or noise and may be more than 10 times background. See, e.g., Fundamental Immunology 332-36 (Paul ed., 2d ed. 1989) for a discussion regarding binding specificity. In certain embodiments, the extent of binding of a binding molecule or antigen binding domain to a “non-target” protein is less than about 10% of the binding of the binding molecule or antigen binding domain to its particular target antigen, for example, as determined by fluorescence activated cell sorting (FACS) analysis or RIA. A binding molecule or antigen binding domain that binds to an antigen includes one that is capable of binding the antigen with sufficient affinity such that the binding molecule is useful, for example, as a therapeutic and/or diagnostic agent in targeting the antigen. In certain embodiments, a binding molecule or antigen binding domain that binds to an antigen has a dissociation constant (K_{D}) of less than or equal to 1 μM, 800 nM, 600 nM, 550 nM, 500 nM, 300 nM, 250 nM, 100 nM, 50 nM, 10 nM, 5 nM, 4 nM, 3 nM, 2 nM, 1 nM, 0.9 nM, 0.8 nM, 0.7 nM, 0.6 nM, 0.5 nM, 0.4 nM, 0.3 nM, 0.2 nM, or 0.1 nM. In certain embodiments, a binding molecule or antigen binding domain binds to an epitope of an antigen that is conserved among the antigen from different species.

[0639] In certain embodiments, the binding molecules or antigen binding domains can comprise “chimeric” sequences in which a portion of the heavy and/or light chain is identical with or homologous to corresponding sequences in antibodies derived from a particular species or belonging to a particular antibody class or subclass, while the remainder of the chain(s) is identical with or homologous to corresponding sequences in antibodies derived from another species or belonging to another antibody class or subclass, as well as fragments of such antibodies, so long as they exhibit the desired biological activity (see U.S. Pat. No. 4,816,567; and Morrison et al., 1984, Proc. Natl. Acad. Sci. USA 81:6851-55). Chimeric sequences may include humanized sequences.

[0640] In certain embodiments, the binding molecules or antigen binding domains can comprise portions of “humanized” forms of nonhuman (e.g., camelid, murine, non-human primate) antibodies that include sequences from human immunoglobulins (e.g., recipient antibody) in which the native CDR residues are replaced by residues from the corresponding CDR of a nonhuman species (e.g., donor antibody) such as camelid, mouse, rat, rabbit, or nonhuman primate having the desired specificity, affinity, and capacity. In some instances, one or more FR region residues of the human immunoglobulin sequences are replaced by corresponding nonhuman residues. Furthermore, humanized antibodies can comprise residues that are not found in the recipient antibody or in the donor antibody. These modifications are made to further refine antibody performance. A humanized antibody heavy or light chain can comprise substantially all of at least one or more variable regions, in which all or substantially all of the CDRs correspond to those of a nonhuman immunoglobulin and all or substantially all of the FRs are those of a human immunoglobulin sequence. In certain embodiments, the humanized antibody will comprise at least a portion of an immunoglobulin constant region (Fc), typically that of a human immunoglobulin. For further details, see, Jones et al., Nature 321:522-25 (1986); Riechmann et al., Nature 332:323-29 (1988); Presta, Curr. Op. Struct. Biol. 2:593-96 (1992); Carter et al., Proc. Natl. Acad. Sci. USA 89:4285-89 (1992); U.S. Pat. Nos. 6,800,738; 6,719,971; 6,639,055; 6,407,213; and 6,054,297.

[0641] In certain embodiments, the binding molecules or antigen binding domains can comprise portions of a “fully human antibody” or “human antibody,” wherein the terms are used interchangeably herein and refer to an antibody that comprises a human variable region and, for example, a human constant region. The binding molecules may comprise an antibody sequence. In specific embodiments, the terms refer to an antibody that comprises a variable region and constant region of human origin. “Fully human” antibodies, in certain embodiments, can also encompass antibodies which bind polypeptides and are encoded by nucleic acid sequences which are naturally occurring somatic variants of human germline immunoglobulin nucleic acid sequence. The term “fully human antibody” includes antibodies having variable and constant regions corresponding to human germline immunoglobulin sequences as described by Kabat et al. (See Kabat et al. (1991) Sequences of Proteins of Immunological Interest, Fifth Edition, U.S. Department of Health and Human Services, NIH Publication No. 91-3242). A “human antibody” is one that possesses an amino acid sequence which corresponds to that of an antibody produced by a human and/or has been made using any of the techniques for making human antibodies. This definition of a human antibody specifically excludes a humanized antibody comprising non-human antigen-binding residues. Human antibodies can be produced using various techniques known in the art, including phage-display libraries (Hoogenboom and Winter, J. Mol. Biol. 227:381 (1991); Marks et al., J. Mol. Biol. 222:581 (1991)) and yeast display libraries (Chao et al., Nature Protocols 1: 755-68 (2006)). Also available for the preparation of human monoclonal antibodies are methods described in Cole et al., Monoclonal Antibodies and Cancer Therapy 77 (1985); Boerner et al., J. Immunol. 147(1):86-95 (1991); and van Dijk and van de Winkel, Curr. Opin. Pharmacol. 5: 368-74 (2001). Human antibodies can be prepared by administering the antigen to a transgenic animal that has been modified to produce such antibodies in response to antigenic challenge, but whose endogenous loci have been disabled, e.g., mice (see, e.g., Jakobovits, Curr. Opin. Biotechnol. 6(5):561-66 (1995); Brnggemann and Taussing, Curr. Opin. Biotechnol. 8(4):455-58 (1997); and U.S. Pat. Nos. 6,075,181 and 6,150,584 regarding XENOMOUSE™ technology). See also, for example, Li et al., Proc. Natl. Acad. Sci. USA 103:3557-62 (2006) regarding human antibodies generated via a human B-cell hybridoma technology.

[0642] In certain embodiments, the binding molecules or antigen binding domains can comprise portions of a “recombinant human antibody,” wherein the phrase includes human antibodies that are prepared, expressed, created or isolated by recombinant means, such as antibodies expressed using a recombinant expression vector transfected into a host cell, antibodies isolated from a recombinant, combinatorial human antibody library, antibodies isolated from an animal (e.g., a mouse or cow) that is transgenic and/or transchromosomal for human immunoglobulin genes (see, e.g., Taylor, L. D. et al., Nucl. Acids Res. 20:6287-6295 (1992)) or antibodies prepared, expressed, created or isolated by any other means that involves splicing of human immunoglobulin gene sequences to other DNA sequences. Such recombinant human antibodies can have variable and constant regions derived from human germline immunoglobulin sequences (See Kabat, E. A. et al. (1991) Sequences of Proteins of Immunological Interest, Fifth Edition, U.S. Department of Health and Human Services, NIH Publication No. 91-3242). In certain embodiments, however, such recombinant human antibodies are subjected to in vitro mutagenesis (or, when an animal transgenic for human Ig sequences is used, in vivo somatic mutagenesis) and thus the amino acid sequences of the VH and VL regions of the recombinant antibodies are sequences that, while derived from and related to human germline VH and VL sequences, may not naturally exist within the human antibody germline repertoire in vivo.

[0643] In certain embodiments, the binding molecules or antigen binding domains can comprise a portion of a “monoclonal antibody,” wherein the term as used herein refers to an antibody obtained from a population of substantially homogeneous antibodies, e.g., the individual antibodies comprising the population are identical except for possible naturally occurring mutations that may be present in minor amounts or well-known post-translational modifications such as amino acid isomerization or deamidation, methionine oxidation or asparagine or glutamine deamidation, each monoclonal antibody will typically recognize a single epitope on the antigen. In specific embodiments, a “monoclonal antibody,” as used herein, is an antibody produced by a single hybridoma or other cell. The term “monoclonal” is not limited to any particular method for making the antibody. For example, the monoclonal antibodies useful in the present disclosure may be prepared by the hybridoma methodology first described by Kohler et al., Nature 256:495 (1975), or may be made using recombinant DNA methods in bacterial or eukaryotic animal or plant cells (see, e.g., U.S. Pat. No. 4,816,567). The “monoclonal antibodies” may also be isolated from phage antibody libraries using the techniques described in Clackson et al., Nature 352:624-28 (1991) and Marks et al., J. Mol. Biol. 222:581-97 (1991), for example. Other methods for the preparation of clonal cell lines and of monoclonal antibodies expressed thereby are well known in the art. See, e.g., Short Protocols in Molecular Biology (Ausubel et al. eds., 5th ed. 2002).

[0644] A typical 4-chain antibody unit is a heterotetrameric glycoprotein composed of two identical light (L) chains and two identical heavy (H) chains. In the case of IgGs, the 4-chain unit is generally about 150,000 daltons. Each L chain is linked to an H chain by one covalent disulfide bond, while the two H chains are linked to each other by one or more disulfide bonds depending on the H chain isotype. Each H and L chain also has regularly spaced intrachain disulfide bridges. Each H chain has at the N-terminus, a variable domain (VH) followed by three constant domains (CH) for each of the α and γ chains and four CH domains for μ and ε isotypes. Each L chain has at the N-terminus, a variable domain (VL) followed by a constant domain (CL) at its other end. The VL is aligned with the VH, and the CL is aligned with the first constant domain of the heavy chain (CH1). Particular amino acid residues are believed to form an interface between the light chain and heavy chain variable domains. The pairing of a VH and VL together forms a single antigen-binding site. For the structure and properties of the different classes of antibodies, see, for example, Basic and Clinical Immunology 71 (Stites et al. eds., 8th ed. 1994); and Immunobiology (Janeway et al. eds., 5^{th} ed. 2001).

[0645] The term “Fab” or “Fab region” refers to an antibody region that binds to antigens. A conventional IgG usually comprises two Fab regions, each residing on one of the two arms of the Y-shaped IgG structure. Each Fab region is typically composed of one variable region and one constant region of each of the heavy and the light chain. More specifically, the variable region and the constant region of the heavy chain in a Fab region are VH and CH1 regions, and the variable region and the constant region of the light chain in a Fab region are VL and CL regions. The VH, CH1, VL, and CL in a Fab region can be arranged in various ways to confer an antigen binding capability according to the present disclosure. For example, VH and CH1 regions can be on one polypeptide, and VL and CL regions can be on a separate polypeptide, similarly to a Fab region of a conventional IgG. Alternatively, VH, CH1, VL and CL regions can all be on the same polypeptide and oriented in different orders as described in more detail the sections below.

[0646] The term “variable region,” “variable domain,” “V region,” or “V domain” refers to a portion of the light or heavy chains of an antibody that is generally located at the amino-terminal of the light or heavy chain and has a length of about 120 to 130 amino acids in the heavy chain and about 100 to 110 amino acids in the light chain, and are used in the binding and specificity of each particular antibody for its particular antigen. The variable region of the heavy chain may be referred to as “VH.” The variable region of the light chain may be referred to as “VL.” The term “variable” refers to the fact that certain segments of the variable regions differ extensively in sequence among antibodies. The V region mediates antigen binding and defines specificity of a particular antibody for its particular antigen. However, the variability is not evenly distributed across the 110-amino acid span of the variable regions. Instead, the V regions consist of less variable (e.g., relatively invariant) stretches called framework regions (FRs) of about 15-30 amino acids separated by shorter regions of greater variability (e.g., extreme variability) called “hypervariable regions” that are each about 9-12 amino acids long. The variable regions of heavy and light chains each comprise four FRs, largely adopting a βsheet configuration, connected by three hypervariable regions, which form loops connecting, and in some cases form part of, the βsheet structure. The hypervariable regions in each chain are held together in close proximity by the FRs and, with the hypervariable regions from the other chain, contribute to the formation of the antigen-binding site of antibodies (see, e.g., Kabat et al., Sequences of Proteins of Immunological Interest (5th ed. 1991)). The constant regions are not involved directly in binding an antibody to an antigen, but exhibit various effector functions, such as participation of the antibody in antibody dependent cellular cytotoxicity (ADCC) and complement dependent cytotoxicity (CDC). The variable regions differ extensively in sequence between different antibodies. In specific embodiments, the variable region is a human variable region.

[0647] The term “variable region residue numbering according to Kabat” or “amino acid position numbering as in Kabat”, and variations thereof, refer to the numbering system used for heavy chain variable regions or light chain variable regions of the compilation of antibodies in Kabat et al., supra. Using this numbering system, the actual linear amino acid sequence may contain fewer or additional amino acids corresponding to a shortening of, or insertion into, an FR or CDR of the variable domain. For example, a heavy chain variable domain may include a single amino acid insert (residue 52a according to Kabat) after residue 52 and three inserted residues (e.g., residues 82a, 82b, and 82c, etc. according to Kabat) after residue 82. The Kabat numbering of residues may be determined for a given antibody by alignment at regions of homology of the sequence of the antibody with a “standard” Kabat numbered sequence. The Kabat numbering system is generally used when referring to a residue in the variable domain (approximately residues 1-107 of the light chain and residues 1-113 of the heavy chain) (e.g., Kabat et al., supra). The “EU numbering system” or “EU index” is generally used when referring to a residue in an immunoglobulin heavy chain constant region (e.g., the EU index reported in Kabat et al., supra). The “EU index as in Kabat” refers to the residue numbering of the human IgG 1 EU antibody. Other numbering systems have been described, for example, by AbM, Chothia, Contact, IMGT, and AHon.

[0648] The term “heavy chain” when used in reference to an antibody refers to a polypeptide chain of about 50-70 kDa, wherein the amino-terminal portion includes a variable region of about 120 to 130 or more amino acids, and a carboxy-terminal portion includes a constant region. The constant region can be one of five distinct types, (e.g., isotypes) referred to as alpha (α), delta (δ), epsilon (ε), gamma (γ), and mu (μ), based on the amino acid sequence of the heavy chain constant region. The distinct heavy chains differ in size: α, δ, and γ contain approximately 450 amino acids, while μ and ε contain approximately 550 amino acids. When combined with a light chain, these distinct types of heavy chains give rise to five well known classes (e.g., isotypes) of antibodies, IgA, IgD, IgE, IgG, and IgM, respectively, including four subclasses of IgG, namely IgG1, IgG2, IgG3, and IgG4.

[0649] The term “light chain” when used in reference to an antibody refers to a polypeptide chain of about 25 kDa, wherein the amino-terminal portion includes a variable region of about 100 to about 110 or more amino acids, and a carboxy-terminal portion includes a constant region. The approximate length of a light chain is 211 to 217 amino acids. There are two distinct types, referred to as kappa (κ) or lambda (λ) based on the amino acid sequence of the constant domains.

[0650] As used herein, the terms “hypervariable region,” “HVR,” “Complementarity Determining Region,” and “CDR” are used interchangeably. A “CDR” refers to one of three hypervariable regions (H1, H2 or H3) within the non-framework region of the immunoglobulin (Ig or antibody) VH β-sheet framework, or one of three hypervariable regions (L1, L2 or L3) within the non-framework region of the antibody VL β-sheet framework. CDR1, CDR2 and CDR3 in VH domain are also referred to as HCDR1, HCDR2 and HCDR3, respectively. CDR1, CDR2 and CDR3 in VL domain are also referred to as LCDR1, LCDR2 and LCDR3, respectively. Accordingly, CDRs are variable region sequences interspersed within the framework region sequences.

[0651] The term “gene expression” describes the conversion of the DNA gene sequence information into transcribed RNA (the initial unspliced RNA transcript or the mature mRNA) or the encoded protein product. Gene expression can be monitored by measuring the levels of either the entire RNA or protein products of the gene or their subsequences.

[0652] CDR regions are well known to those skilled in the art and have been defined by well-known numbering systems. For example, the Kabat Complementarity Determining Regions (CDRs) are based on sequence variability and are the most commonly used (see, e.g., Kabat et al., supra; Nick Deschacht et al., J Immunol 2010; 184:5696-5704). Chothia refers instead to the location of the structural loops (see, e.g., Chothia and Lesk, J. Mol. Biol. 196:901-17 (1987)). The end of the Chothia CDR-H1 loop when numbered using the Kabat numbering convention varies between H32 and H34 depending on the length of the loop (this is because the Kabat numbering scheme places the insertions at H35A and H35B; if neither 35A nor 35B is present, the loop ends at 32; if only 35A is present, the loop ends at 33; if both 35A and 35B are present, the loop ends at 34). The AbM hypervariable regions represent a compromise between the Kabat CDRs and Chothia structural loops, and are used by Oxford Molecular's AbM antibody modeling software (see, e.g., Antibody Engineering Vol. 2 (Kontermann and Dubel eds., 2d ed. 2010)). The “contact” hypervariable regions are based on an analysis of the available complex crystal structures. Another universal numbering system that has been developed and widely adopted is ImMunoGeneTics (IMGT) Information System® (Lafranc et al., Dev. Comp. Immunol. 27(1):55-77 (2003)). IMGT is an integrated information system specializing in immunoglobulins (IG), T-cell receptors (TCR), and major histocompatibility complex (MHC) of human and other vertebrates. Herein, the CDRs are referred to in terms of both the amino acid sequence and the location within the light or heavy chain. As the “location” of the CDRs within the structure of the immunoglobulin variable domain is conserved between species and present in structures called loops, by using numbering systems that align variable domain sequences according to structural features, CDR and framework residues are readily identified. This information can be used in grafting and replacement of CDR residues from immunoglobulins of one species into an acceptor framework from, typically, a human antibody. An additional numbering system (AHon) has been developed by Honegger and Plnckthun, J. Mol. Biol. 309: 657-70 (2001). Correspondence between the numbering system, including, for example, the Kabat numbering and the IMGT unique numbering system, is well known to one skilled in the art (see, e.g., Kabat, supra; Chothia and Lesk, supra; Martin, supra; Lefranc et al., supra). The residues from each of these hypervariable regions or CDRs are exemplified in Table 1 below.

TABLE 1
Exemplary CDRs According to Various Numbering Systems

| Loop | Kabat | AbM | Chothia | Contact | IMGT |
|---|---|---|---|---|---|
| CDR | L24--L34 | L24--L34 | L26--L32 | L30-- | L27--L38 |
| L1 | | | or | L36 | |
| | | | L24--L34 | | |
| CDR | L50--L56 | L50--L56 | L50--L52 | L46-- | L56--L65 |
| L2 | | | or | L55 | |
| | | | L50--L56 | | |
| CDR | L89--L97 | L89--L97 | L91--L96 | L89-- | L105-L117 |
| L3 | | | or | L96 | |
| | | | L89--L97 | | |
| CDR | H31--H35B | H26--H35B | H26--H32 | H30-- | H27--H38 |
| H1 | (Kabat | | . . . 34 | H35B | |
| | Numbering) | | | | |
| CDR | H31--H35 | H26--H35 | H26--H32 | H30-- | |
| H1 | (Chothia | | | H35 | |
| | Numbering) | | | | |
| CDR | H50--H65 | H50--H58 | H53--H55 | H47-- | H56--H65 |
| H2 | | | or | H58 | |
| | | | H52--H56 | | |
| CDR | H95--H102 | H95--H102 | H96--H101 | H93-- | H105-H117 |
| H3 | | | or | H101 | |
| | | | H95--H102 | | |

[0653] The boundaries of a given CDR may vary depending on the scheme used for identification. Thus, unless otherwise specified, the terms “CDR” and “complementary determining region” of a given antibody or region thereof, such as a variable region, as well as individual CDRs (e.g., CDR-H1, CDR-H2) of the antibody or region thereof, should be understood to encompass the complementary determining region as defined by any of the known schemes described herein above. In some instances, the scheme for identification of a particular CDR or CDRs is specified, such as the CDR as defined by the IMGT, Kabat, Chothia, or Contact method. In other cases, the particular amino acid sequence of a CDR is given. It should be noted CDR regions may also be defined by a combination of various numbering systems, e.g., a combination of Kabat and Chothia numbering systems, or a combination of Kabat and IMGT numbering systems. Therefore, the term such as “a CDR1 as set forth in a specific VH” includes any CDR1 as defined by the exemplary CDR numbering systems described above, but is not limited thereby. Once a variable region (e.g., a VH or VL) is given, those skilled in the art would understand that CDRs within the region can be defined by different numbering systems or combinations thereof.

[0654] Hypervariable regions may comprise “extended hypervariable regions” as follows: 24-36 or 24-34 (L1), 46-56 or 50-56 (L2), and 89-97 or 89-96 (L3) in the VL, and 26-35 or 26-35A (H1), 50-65 or 49-65 (H2), and 93-102, 94-102, or 95-102 (H3) in the VH.

[0655] The term “constant region” or “constant domain” refers to a carboxy terminal portion of the light and heavy chain which is not directly involved in binding of the antibody to antigen but exhibits various effector function, such as interaction with the Fc receptor. The term refers to the portion of an immunoglobulin molecule having a more conserved amino acid sequence relative to the other portion of the immunoglobulin, the variable region, which contains the antigen binding site. The constant region may contain the CH1, CH2, and CH3 regions of the heavy chain and the CL region of the light chain.

[0656] The term “framework” or “FR” refers to those variable region residues flanking the CDRs. FR residues are present, for example, in chimeric, humanized, human, domain antibodies, diabodies, linear antibodies, and bispecific antibodies. FR residues are those variable domain residues other than the hypervariable region residues or CDR residues.

[0657] The term “Fc region” herein is used to define a C-terminal region of an immunoglobulin heavy chain, including, for example, native sequence Fc regions, recombinant Fc regions, and variant Fc regions. Although the boundaries of the Fc region of an immunoglobulin heavy chain might vary, the human IgG heavy chain Fc region is often defined to stretch from an amino acid residue at position Cys226, or from Pro230, to the carboxyl-terminus thereof. The C-terminal lysine (residue 447 according to the EU numbering system) of the Fc region may be removed, for example, during production or purification of the antibody, or by recombinantly engineering the nucleic acid encoding a heavy chain of the antibody. Accordingly, a composition of intact antibodies may comprise antibody populations with all K447 residues removed, antibody populations with no K447 residues removed, and antibody populations having a mixture of antibodies with and without the K447 residue. A “functional Fc region” possesses an “effector function” of a native sequence Fc region. Exemplary “effector functions” include C1q binding; CDC; Fc receptor binding; ADCC; phagocytosis; downregulation of cell surface receptors (e.g., B cell receptor), etc. Such effector functions generally require the Fc region to be combined with a binding region or binding domain (e.g., an antibody variable region or domain) and can be assessed using various assays known to those skilled in the art. A “variant Fc region” comprises an amino acid sequence which differs from that of a native sequence Fc region by virtue of at least one amino acid modification (e.g., substituting, addition, or deletion). In certain embodiments, the variant Fc region has at least one amino acid substitution compared to a native sequence Fc region or to the Fc region of a parent polypeptide, for example, from about one to about ten amino acid substitutions, or from about one to about five amino acid substitutions in a native sequence Fc region or in the Fc region of a parent polypeptide. The variant Fc region herein can possess at least about 80% homology with a native sequence Fc region and/or with an Fc region of a parent polypeptide, or at least about 90% homology therewith, for example, at least about 95% homology therewith.

[0658] As used herein, an “epitope” is a term in the art and refers to a localized region of an antigen to which a binding molecule (e.g., an antibody) can specifically bind. An epitope can be a linear epitope or a conformational, non-linear, or discontinuous epitope. In the case of a polypeptide antigen, for example, an epitope can be contiguous amino acids of the polypeptide (a “linear” epitope) or an epitope can comprise amino acids from two or more non-contiguous regions of the polypeptide (a “conformational,” “non-linear” or “discontinuous” epitope). It will be appreciated by one of skill in the art that, in general, a linear epitope may or may not be dependent on secondary, tertiary, or quaternary structure. For example, in some embodiments, a binding molecule binds to a group of amino acids regardless of whether they are folded in a natural three dimensional protein structure. In other embodiments, a binding molecule requires amino acid residues making up the epitope to exhibit a particular conformation (e.g., bend, twist, turn or fold) in order to recognize and bind the epitope.

[0659] “Percent (%) amino acid sequence identity” and “homology” with respect to a peptide, polypeptide or antibody sequence are defined as the percentage of amino acid residues in a candidate sequence that are identical with the amino acid residues in the specific peptide or polypeptide sequence, after aligning the sequences and introducing gaps, if necessary, to achieve the maximum percent sequence identity, and not considering any conservative substitutions as part of the sequence identity. Alignment for purposes of determining percent amino acid sequence identity can be achieved in various ways that are within the skill in the art, for instance, using publicly available computer software such as BLAST, BLAST-2, ALIGN or MEGALIGN™ (DNASTAR) software. Those skilled in the art can determine appropriate parameters for measuring alignment, including any algorithms needed to achieve maximal alignment over the full length of the sequences being compared.

[0660] The term “specificity” refers to selective recognition of an antigen binding protein for a particular epitope of an antigen. Natural antibodies, for example, are monospecific. The term “multispecific” as used herein denotes that an antigen binding protein has two or more antigen-binding sites of which at least two bind different antigens. “Bispecific” as used herein denotes that an antigen binding protein has two different antigen-binding specificities. The term “monospecific” antibody as used herein denotes an antigen binding protein that has one or more binding sites each of which bind the same antigen.

[0661] The term “valent” as used herein denotes the presence of a specified number of binding sites in an antigen binding protein. A natural antibody for example or a full length antibody has two binding sites and is bivalent. As such, the terms “trivalent”, “tetravalent”, “pentavalent” and “hexavalent” denote the presence of two binding site, three binding sites, four binding sites, five binding sites, and six binding sites, respectively, in an antigen binding protein.

[0662] The terms “polypeptide” and “peptide” and “protein” are used interchangeably herein and refer to polymers of amino acids of any length. The polymer may be linear or branched, it may comprise modified amino acids, and it may be interrupted by non-amino acids. The terms also encompass an amino acid polymer that has been modified naturally or by intervention; for example, disulfide bond formation, glycosylation, lipidation, acetylation, phosphorylation, or any other manipulation or modification. Also included within the definition are, for example, polypeptides containing one or more analogs of an amino acid, including but not limited to, unnatural amino acids, as well as other modifications known in the art. It is understood that, because the polypeptides of this disclosure may be based upon antibodies or other members of the immunoglobulin superfamily, in certain embodiments, a “polypeptide” can occur as a single chain or as two or more associated chains.

[0663] “Polynucleotide” or “nucleic acid,” as used interchangeably herein, refers to polymers of nucleotides of any length and includes DNA and RNA. The nucleotides can be deoxyribonucleotides, ribonucleotides, modified nucleotides or bases, and/or their analogs, or any substrate that can be incorporated into a polymer by DNA or RNA polymerase or by a synthetic reaction. A polynucleotide may comprise modified nucleotides, such as methylated nucleotides and their analogs. “Oligonucleotide,” as used herein, refers to short, generally single-stranded, synthetic polynucleotides that are generally, but not necessarily, fewer than about 200 nucleotides in length. The terms “oligonucleotide” and “polynucleotide” are not mutually exclusive. The description above for polynucleotides is equally and fully applicable to oligonucleotides. A cell that produces a binding molecule of the present disclosure may include a parent hybridoma cell, as well as bacterial and eukaryotic host cells into which nucleic acids encoding the antibodies have been introduced. Unless specified otherwise, the left-hand end of any single-stranded polynucleotide sequence disclosed herein is the 5′ end; the left-hand direction of double-stranded polynucleotide sequences is referred to as the 5′ direction. The direction of 5′ to 3′ addition of nascent RNA transcripts is referred to as the transcription direction; sequence regions on the DNA strand having the same sequence as the RNA transcript that are 5′ to the 5′ end of the RNA transcript are referred to as “upstream sequences”; sequence regions on the DNA strand having the same sequence as the RNA transcript that are 3′ to the 3′ end of the RNA transcript are referred to as “downstream sequences.”

[0664] An “isolated nucleic acid” is a nucleic acid, for example, an RNA, DNA, or a mixed nucleic acids, which is substantially separated from other genome DNA sequences as well as proteins or complexes such as ribosomes and polymerases, which naturally accompany a native sequence. An “isolated” nucleic acid molecule is one which is separated from other nucleic acid molecules which are present in the natural source of the nucleic acid molecule. Moreover, an “isolated” nucleic acid molecule, such as a cDNA molecule, can be substantially free of other cellular material, or culture medium when produced by recombinant techniques, or substantially free of chemical precursors or other chemicals when chemically synthesized. In a specific embodiment, one or more nucleic acid molecules encoding an antibody as described herein are isolated or purified. The term embraces nucleic acid sequences that have been removed from their naturally occurring environment, and includes recombinant or cloned DNA isolates and chemically synthesized analogues or analogues biologically synthesized by heterologous systems. A substantially pure molecule may include isolated forms of the molecule. Specifically, an “isolated” nucleic acid molecule encoding an antibody described herein is a nucleic acid molecule that is identified and separated from at least one contaminant nucleic acid molecule with which it is ordinarily associated in the environment in which it was produced.

[0665] Unless otherwise specified, a “nucleotide sequence encoding an amino acid sequence” includes all nucleotide sequences that are degenerate versions of each other and that encode the same amino acid sequence. The phrase nucleotide sequence that encodes a protein or an RNA may also include introns to the extent that the nucleotide sequence encoding the protein may in some version contain an intron(s).

[0666] The term “control sequences” refers to DNA sequences necessary for the expression of an operably linked coding sequence in a particular host organism. The control sequences that are suitable for prokaryotes, for example, include a promoter, optionally an operator sequence, and a ribosome binding site. Eukaryotic cells are known to utilize promoters, polyadenylation signals, and enhancers.

[0667] As used herein, the term “operatively linked,” and similar phrases (e.g., genetically fused), when used in reference to nucleic acids or amino acids, refer to the operational linkage of nucleic acid sequences or amino acid sequence, respectively, placed in functional relationships with each other. For example, an operatively linked promoter, enhancer elements, open reading frame, 5′ and 3′ UTR, and terminator sequences result in the accurate production of a nucleic acid molecule (e.g., RNA). In some embodiments, operatively linked nucleic acid elements result in the transcription of an open reading frame and ultimately the production of a polypeptide (i.e., expression of the open reading frame). As another example, an operatively linked peptide is one in which the functional domains are placed with appropriate distance from each other to impart the intended function of each domain.

[0668] The term “vector” refers to a substance that is used to carry or include a nucleic acid sequence, including for example, a nucleic acid sequence encoding a binding molecule (e.g., an antibody) as described herein, in order to introduce a nucleic acid sequence into a host cell. Vectors applicable for use include, for example, expression vectors, plasmids, phage vectors, viral vectors, episomes, and artificial chromosomes, which can include selection sequences or markers operable for stable integration into a host cell's chromosome. Additionally, the vectors can include one or more selectable marker genes and appropriate expression control sequences. Selectable marker genes that can be included, for example, provide resistance to antibiotics or toxins, complement auxotrophic deficiencies, or supply critical nutrients not in the culture media. Expression control sequences can include constitutive and inducible promoters, transcription enhancers, transcription terminators, and the like, which are well known in the art. When two or more nucleic acid molecules are to be co-expressed (e.g., both an antibody heavy and light chain or an antibody VH and VL), both nucleic acid molecules can be inserted, for example, into a single expression vector or in separate expression vectors. For single vector expression, the encoding nucleic acids can be operationally linked to one common expression control sequence or linked to different expression control sequences, such as one inducible promoter and one constitutive promoter. The introduction of nucleic acid molecules into a host cell can be confirmed using methods well known in the art. Such methods include, for example, nucleic acid analysis such as Northern blots or polymerase chain reaction (PCR) amplification of mRNA, immunoblotting for expression of gene products, or other suitable analytical methods to test the expression of an introduced nucleic acid sequence or its corresponding gene product. It is understood by those skilled in the art that the nucleic acid molecules are expressed in a sufficient amount to produce a desired product and it is further understood that expression levels can be optimized to obtain sufficient expression using methods well known in the art.

[0669] The term “host” as used herein refers to an animal, such as a mammal (e.g., a human).

[0670] The term “host cell” as used herein refers to a particular subject cell that may be transfected with a nucleic acid molecule and the progeny or potential progeny of such a cell. Progeny of such a cell may not be identical to the parent cell transfected with the nucleic acid molecule due to mutations or environmental influences that may occur in succeeding generations or integration of the nucleic acid molecule into the host cell genome.

[0671] The term “transfected” or “transformed” or “transduced” as used herein refers to a process by which exogenous nucleic acid is transferred or introduced into the host cell. A “transfected” or “transformed” or “transduced” cell is one which has been transfected, transformed or transduced with exogenous nucleic acid. The cell includes the primary subject cell and its progeny.

[0672] The term “pharmaceutically acceptable” as used herein means being approved by a regulatory agency of the Federal or a state government, or listed in United States Pharmacopeia, European Pharmacopeia, or other generally recognized Pharmacopeia for use in animals, and more particularly in humans.

[0673] “Excipient” means a pharmaceutically-acceptable material, composition, or vehicle, such as a liquid or solid filler, diluent, solvent, or encapsulating material. Excipients include, for example, encapsulating materials or additives such as absorption accelerators, antioxidants, binders, buffers, carriers, coating agents, coloring agents, diluents, disintegrating agents, emulsifiers, extenders, fillers, flavoring agents, humectants, lubricants, perfumes, preservatives, propellants, releasing agents, sterilizing agents, sweeteners, solubilizers, wetting agents and mixtures thereof. The term “excipient” can also refer to a diluent, adjuvant (e.g., Freunds' adjuvant (complete or incomplete) or vehicle.

[0674] In some embodiments, excipients are pharmaceutically acceptable excipients. Examples of pharmaceutically acceptable excipients include buffers, such as phosphate, citrate, and other organic acids; antioxidants, including ascorbic acid; low molecular weight (e.g., fewer than about 10 amino acid residues) polypeptide; proteins, such as serum albumin, gelatin, or immunoglobulins; hydrophilic polymers, such as polyvinylpyrrolidone; amino acids, such as glycine, glutamine, asparagine, arginine, or lysine; monosaccharides, disaccharides, and other carbohydrates, including glucose, mannose, or dextrins; chelating agents, such as EDTA; sugar alcohols, such as mannitol or sorbitol; salt-forming counterions, such as sodium; and/or nonionic surfactants, such as TWEEN™, polyethylene glycol (PEG), and PLURONICS™. Other examples of pharmaceutically acceptable excipients are described in Remington and Gennaro, Remington's Pharmaceutical Sciences (18th ed. 1990).

[0675] In one embodiment, each component is “pharmaceutically acceptable” in the sense of being compatible with the other ingredients of a pharmaceutical formulation, and suitable for use in contact with the tissue or organ of humans and animals without excessive toxicity, irritation, allergic response, immunogenicity, or other problems or complications, commensurate with a reasonable benefit/risk ratio. See, e.g., Lippincott Williams & Wilkins: Philadelphia, PA, 2005; Handbook of Pharmaceutical Excipients, 6th ed.; Rowe et al., Eds.; The Pharmaceutical Press and the American Pharmaceutical Association: 2009; Handbook of Pharmaceutical Additives, 3rd ed.; Ash and Ash Eds.; Gower Publishing Company: 2007; Pharmaceutical Preformulation and Formulation, 2nd ed.; Gibson Ed.; CRC Press LLC: Boca Raton, FL, 2009. In some embodiments, pharmaceutically acceptable excipients are nontoxic to the cell or mammal being exposed thereto at the dosages and concentrations employed. In some embodiments, a pharmaceutically acceptable excipient is an aqueous pH buffered solution.

[0676] In some embodiments, excipients are sterile liquids, such as water and oils, including those of petroleum, animal, vegetable, or synthetic origin, such as peanut oil, soybean oil, mineral oil, sesame oil, and the like. Water is an exemplary excipient when a composition (e.g., a pharmaceutical composition) is administered intravenously. Saline solutions and aqueous dextrose and glycerol solutions can also be employed as liquid excipients, particularly for injectable solutions. An excipient can also include starch, glucose, lactose, sucrose, gelatin, malt, rice, flour, chalk, silica gel, sodium stearate, glycerol monostearate, talc, sodium chloride, dried skim milk, glycerol, propylene, glycol, water, ethanol, and the like. The composition, if desired, can also contain minor amounts of wetting or emulsifying agents, or pH buffering agents. Compositions can take the form of solutions, suspensions, emulsion, tablets, pills, capsules, powders, sustained-release formulations, and the like. Oral compositions, including formulations, can include standard excipients such as pharmaceutical grades of mannitol, lactose, starch, magnesium stearate, sodium saccharine, cellulose, magnesium carbonate, etc.

[0677] Compositions, including pharmaceutical compounds, may contain a binding molecule (e.g., an antibody), for example, in isolated or purified form, together with a suitable amount of excipients.

[0678] The term “effective amount” or “therapeutically effective amount” as used herein refers to the amount of an antibody or a therapeutic molecule comprising an agent and the antibody or pharmaceutical composition provided herein which is sufficient to result in the desired outcome.

[0679] The terms “subject” and “patient” may be used interchangeably. As used herein, in certain embodiments, a subject is a mammal, such as a non-primate or a primate (e.g., human). In specific embodiments, the subject is a human. In one embodiment, the subject is a mammal, e.g., a human, diagnosed with a disease or disorder. In another embodiment, the subject is a mammal, e.g., a human, at risk of developing a disease or disorder.

[0680] “Administer” or “administration” refers to the act of injecting or otherwise physically delivering a substance as it exists outside the body into a patient, such as by mucosal, intradermal, intravenous, intramuscular delivery, and/or any other method of physical delivery described herein or known in the art.

[0681] As used herein, the terms “treat,” “treatment” and “treating” refer to the reduction or amelioration of the progression, severity, and/or duration of a disease or condition resulting from the administration of one or more therapies. Treating may be determined by assessing whether there has been a decrease, alleviation and/or mitigation of one or more symptoms associated with the underlying disorder such that an improvement is observed with the patient, despite that the patient may still be afflicted with the underlying disorder. The term “treating” includes both managing and ameliorating the disease. The terms “manage,” “managing,” and “management” refer to the beneficial effects that a subject derives from a therapy which does not necessarily result in a cure of the disease.

[0682] The terms “prevent,” “preventing,” and “prevention” refer to reducing the likelihood of the onset (or recurrence) of a disease, disorder, condition, or associated symptom(s) (e.g., diabetes or a cancer).

[0683] “IL-23R associated disease or disorder” as used herein refers to a disease or disorder that comprises a cell or tissue in which IL-23R expression, activity or function is altered or abnormal, including a disease or disorder that: comprises a cell or tissue in with IL-23R is expressed or overexpressed; or comprises a cell on which IL-23R is abnormally expressed; or comprises a cell in or on which IL-23R is abnormally functioning.

[0684] The terms “about” and “approximately” mean within 20%, within 15%, within 10%, within 9%, within 8%, within 7%, within 6%, within 5%, within 4%, within 3%, within 2%, within 1%, or less of a given value or range.

[0685] As used in the present disclosure and claims, the singular forms “a”, “an” and “the” include plural forms unless the context clearly dictates otherwise.

[0686] It is understood that wherever embodiments are described herein with the term “comprising” otherwise analogous embodiments described in terms of “consisting of” and/or “consisting essentially of” are also provided. It is also understood that wherever embodiments are described herein with the phrase “consisting essentially of” otherwise analogous embodiments described in terms of “consisting of” are also provided.

[0687] The term “between” as used in a phrase as such “between A and B” or “between A-B” refers to a range including both A and B.

[0688] The term “and/or” as used in a phrase such as “A and/or B” herein is intended to include both A and B; A or B; A (alone); and B (alone). Likewise, the term “and/or” as used in a phrase such as “A, B, and/or C” is intended to encompass each of the following embodiments: A, B, and C; A, B, or C; A or C; A or B; B or C; A and C; A and B; B and C; A (alone); B (alone); and C (alone).

### IL-23R Binding Molecules

Antibodies that Bind to IL-23R

[0689] In one aspect, provided herein are antibodies capable of binding to IL-23R. IL-23 is a disulfide-linked heterodimer of the IL-23p19 and IL-12/23p40 subunits. The receptor for IL-23 comprises the IL-23R and IL-12Rβ1 subunits. IL-23p19 binding to the N-terminal immunoglobulin (Ig)-like domain of IL-23R is followed by IL-12/23p40 binding to IL-12Rβ1. Ligand binding results in the phosphorylation of JAK2 and TYK2 followed by phosphorylation and nuclear translocation of STAT proteins. STAT3 plays a predominant role in mediating the biological effects of IL-23 signaling. In some embodiments, the antibodies provided herein bind to human IL-23R. An example of human IL-23R extracellular domain (ECD) sequence is shown in Table 3. In some embodiments, the antibodies provided herein bind to rat IL-23R. An example of human IL-23R extracellular domain (ECD) sequence is provided herein and in SEQ ID NO:1267. In some embodiments, the antibodies provided herein bind to human IL-23R and also bind to rat IL-23R. In some embodiments, the antibodies provided herein bind to human IL-23R ECD and rat IL-23R ECD. In some embodiments, the anti-IL-23R antibody provided herein modulates IL-23R activities. In some embodiments, the anti-IL-23R antibody provided herein is an antagonist antibody.

[0690] In some embodiments, the antibody or fragment thereof provided herein is an antagonist antibody against IL-23R. In some embodiments, the antibody or antigen binding fragment provided herein binds the target protein IL-23R and decreases the binding of IL-23 to IL-23R. In some embodiments, the antibody or antigen binding fragment provided herein binds the target protein IL-23R and decreases the binding of IL-23 to IL-23R to a basal level. In one aspect of this embodiment, the antibody or antigen binding fragment reduces the amount of IL-23 that binds to IL-23R. In a further aspect of this embodiment, the antibody or antigen binding fragment completely prevents IL-23 from binding to IL-23R. In a further embodiment, the antibody or antigen binding fragment inhibits STAT activation. In a further embodiment, the antibody or antigen binding fragment inhibits STAT3 phosphorylation. An antibody that inhibits one or more of these IL-23R functional properties (e.g., biochemical, immune, chemical, cellular, physiological or other biological activities, or the like) as determined according to methodologies known to the art and described herein, will be understood to relate to a statistically significant decrease or increase in the particular activity relative to that seen in the absence of the antibody (e.g., or when a control antibody of irrelevant specificity is present). In some embodiments, an antibody that inhibits IL-23R activity affects such a statistically significant decrease by at least 10% of the measured parameter, by at least 50%, 80% or 90%, and in certain embodiments an antibody of the disclosure may inhibit greater than 90%, 95%, 98% or 99% of an IL-23R activity.

[0691] In some embodiments, the anti-IL-23R antibody provided herein binds to IL-23R (e.g., human IL-23R) with a dissociation constant (K_{D}) of ≤1 μM, ≤100 nM, ≤10 nM, ≤1 nM, ≤0.1 nM, ≤0.01 nM, or ≤0.001 nM (e.g. 10⁻⁸ M or less, e.g. from 10⁻⁸ M to 10⁻¹³ M, e.g., from 10⁻⁹ M to 10⁻¹³ M). In some embodiments, the anti-IL-23R antibody provided herein binds to IL-23R ECD (e.g., human IL-23R ECD) with a dissociation constant (K_{D}) of ≤1 μM, ≤100 nM, ≤10 nM, ≤1 nM, ≤0.1 nM, ≤0.01 nM, or ≤0.001 nM (e.g. 10⁻⁸ M or less, e.g. from 10⁻⁸ M to 10⁻¹³ M, e.g., from 10⁻¹³ M to 10⁻¹³ M). In some embodiments, the anti-IL-23R antibody provided herein binds to human and rat IL-23R with a dissociation constant (K_{D}) of ≤1 μM, ≤100 nM, ≤10 nM, ≤1 nM, ≤0.1 nM, ≤0.01 nM, or ≤0.001 nM (e.g. 10⁻⁸ M or less, e.g. from 10⁻⁸ M to 10⁻¹³ M, e.g., from 10⁻⁹ M to 10⁻¹³ M. A variety of methods of measuring binding affinity are known in the art, any of which can be used for purposes of the present disclosure, including by RIA, for example, performed with the Fab version of an antibody of interest and its antigen (Chen et al., 1999, J. Mol Biol 293:865-81); by biolayer interferometry (BLI) or surface plasmon resonance (SPR) assays by Octet@, using, for example, an Octet®Red96 system, or by Biacore®, using, for example, a Biacore®TM-2000 or a Biacore®TM-3000. An “on-rate” or “rate of association” or “association rate” or “kon” may also be determined with the same biolayer interferometry (BLI) or surface plasmon resonance (SPR) techniques described above using, for example, the Octet®Red96, the Biacore®TM-2000, the Biacore®TM-3000 system, the Biacore®TM-8K, or the Biacore®TM-8K+ system.

[0692] In one aspect, provided herein is an antibody that binds to IL-23R. In some embodiments, the antibody comprises a heavy chain variable region and a light chain variable region. In some embodiments, the IL-23R antibody is not a single domain antibody or nanobody. In some embodiments, the IL-23R antibody is a humanized antibody.

[0693] In certain embodiments, provided herein is an IL-23R antibody comprising a VH region, VL region, HCDR1, HCDR2, HCDR3, LCDR1, LCDR2, and/or LCDR3 of any one of the antibodies described herein. In some embodiments, provided herein is an IL-23R antibody comprising a VH region of any one of the antibodies described herein. In some embodiments, provided herein is an IL-23R antibody comprising a VL region of any one of the antibodies described herein. In some embodiments, provided herein is an IL-23R antibody comprising a VH region of any one of the antibodies described herein, and a VL region of any one of the antibodies described herein. In some embodiments, provided herein is an IL-23R antibody comprising a HCDR1, HCDR2, and HCDR3 of any one of the antibodies described herein. In some embodiments, provided herein is an IL-23R antibody comprising a LCDR1, LCDR2, and LCDR3 of any one of the antibodies described herein. In some embodiments, provided herein is an IL-23R antibody comprising a HCDR1, HCDR2, and HCDR3 of any one of the antibodies described herein; and a LCDR1, LCDR2, and LCDR3 of any one of the antibodies described herein. Representative VH and VL amino acid sequences, including HCDR1, HCDR2, HCDR3, LCDR1, LCDR2 and LCDR3 amino acid sequences, of IL-23R antibodies provided herein are provided in the Sequence Listing, as well as Tables 4-9.

[0694] In some embodiments, the antibody is a humanized antibody. In certain embodiments, the antibody is an IgG antibody. In other embodiments, the IgG antibody is an IgG1, IgG2, IgG3, or IgG4 antibody. In some embodiments, the antibody is a bispecific antibody. In certain embodiments, the antibody is multivalent. In other embodiments, the antibody is capable of binding at least three antigens. In some embodiments, the antibody is capable of binding at least five antigens.

[0695] In specific embodiments, the IL-23R antibody comprises a VH region and a VL region. In some embodiments, the IL-23R antibody is a single chain antibody. In some embodiments, the IL-23R antibody is a single domain antibody. In some embodiments, the IL-23R antibody is a nanobody. In certain embodiments, the IL-23R antibody is a VHH antibody. In certain embodiments, the IL-23R antibody is a llama antibody. In some embodiments, the IL-23R antibody is not a single chain antibody. In some embodiments, the IL-23R antibody is not a single domain antibody. In some embodiments, the IL-23R antibody is not a nanobody. In certain embodiments, the IL-23R antibody is not a VHH antibody. In certain embodiments, the IL-23R antibody is not a llama antibody. In some embodiments, the IL-23R antibody is a multispecific antibody. In other embodiments, the IL-23R is a bispecific antibody. In certain embodiments, the multispecific antibody comprises an antigen binding fragment of an IL-23R antibody provided herein. In other embodiments, the bispecific antibody comprises an antigen binding fragment of an IL-23R antibody provided herein.

[0696] In some embodiments, the anti-IL-23R antibodies provide herein are those described in the Examples below. Thus, in some embodiments, the antibody provided herein comprises one or more CDR sequences of any one of SEQ ID NOs:136-269, 786-899. In some embodiments, the antibody provided herein comprises the VH heavy chain CDRs (CDR1, CDR2 and CDR3) sequences of any one of SEQ ID NOs:136-269, 786-899. In some embodiments, the antibody provided herein comprises the VH heavy chain CDRs (CDR1, CDR2 and CDR3) sequences and the VL light chain CDRs (CDR1, CDR2 and CDR3) of any one of SEQ ID NOs:136-269, 786-899. CDR sequences can be determined according to well-known numbering systems. In some embodiments, the CDRs are according to IMGT numbering. In some embodiments, the CDRs are according to Kabat numbering. In some embodiments, the CDRs are according to AbM numbering. In other embodiments, the CDRs are according to Chothia numbering. In other embodiments, the CDRs are according to Contact numbering. In some embodiments, the anti-IL-23R antibody is humanized. In some embodiments, the anti-IL-23R antibody comprises an acceptor human framework, e.g., a human immunoglobulin framework or a human consensus framework.

[0697] In some embodiments, the antibody or antigen binding fragment provided herein comprises an HCDR1, an HCDR2, and an HCDR3 as set forth in SEQ ID NO:138, and an LCDR1, an LCDR2, and an LCDR3 as set forth in SEQ ID NO:139. In some embodiments, the antibody or antigen binding fragment provided herein comprises an HCDR1, an HCDR2, and an HCDR3 as set forth in SEQ ID NO:142, and an LCDR1, an LCDR2, and an LCDR3 as set forth in SEQ ID NO: 143. In some embodiments, the antibody or antigen binding fragment provided herein comprises an HCDR1, an HCDR2, and an HCDR3 as set forth in SEQ ID NO:144, and an LCDR1, an LCDR2, and an LCDR3 as set forth in SEQ ID NO:145. In some embodiments, the antibody or antigen binding fragment provided herein comprises an HCDR1, an HCDR2, and an HCDR3 as set forth in SEQ ID NO:148, and an LCDR1, an LCDR2, and an LCDR3 as set forth in SEQ ID NO:149. In some embodiments, the antibody or antigen binding fragment provided herein comprises an HCDR1, an HCDR2, and an HCDR3 as set forth in SEQ ID NO:150, and an LCDR1, an LCDR2, and an LCDR3 as set forth in SEQ ID NO:151. In some embodiments, the antibody or antigen binding fragment provided herein comprises an HCDR1, an HCDR2, and an HCDR3 as set forth in SEQ ID NO: 152, and an LCDR1, an LCDR2, and an LCDR3 as set forth in SEQ ID NO:153. In some embodiments, the antibody or antigen binding fragment provided herein comprises an HCDR1, an HCDR2, and an HCDR3 as set forth in SEQ ID NO:154, and an LCDR1, an LCDR2, and an LCDR3 as set forth in SEQ ID NO:155. In some embodiments, the antibody or antigen binding fragment provided herein comprises an HCDR1, an HCDR2, and an HCDR3 as set forth in SEQ ID NO:156, and an LCDR1, an LCDR2, and an LCDR3 as set forth in SEQ ID NO:157. In some embodiments, the antibody or antigen binding fragment provided herein comprises an HCDR1, an HCDR2, and an HCDR3 as set forth in SEQ ID NO:158, and an LCDR1, an LCDR2, and an LCDR3 as set forth in SEQ ID NO: 159. In some embodiments, the antibody or antigen binding fragment provided herein comprises an HCDR1, an HCDR2, and an HCDR3 as set forth in SEQ ID NO:160, and an LCDR1, an LCDR2, and an LCDR3 as set forth in SEQ ID NO:161. In some embodiments, the antibody or antigen binding fragment provided herein comprises an HCDR1, an HCDR2, and an HCDR3 as set forth in SEQ ID NO:162, and an LCDR1, an LCDR2, and an LCDR3 as set forth in SEQ ID NO:163. In some embodiments, the antibody or antigen binding fragment provided herein comprises an HCDR1, an HCDR2, and an HCDR3 as set forth in SEQ ID NO:164, and an LCDR1, an LCDR2, and an LCDR3 as set forth in SEQ ID NO:165. In some embodiments, the antibody or antigen binding fragment provided herein comprises an HCDR1, an HCDR2, and an HCDR3 as set forth in SEQ ID NO: 166, and an LCDR1, an LCDR2, and an LCDR3 as set forth in SEQ ID NO:167. In some embodiments, the antibody or antigen binding fragment provided herein comprises an HCDR1, an HCDR2, and an HCDR3 as set forth in SEQ ID NO:168, and an LCDR1, an LCDR2, and an LCDR3 as set forth in SEQ ID NO:169. In some embodiments, the antibody or antigen binding fragment provided herein comprises an HCDR1, an HCDR2, and an HCDR3 as set forth in SEQ ID NO:170, and an LCDR1, an LCDR2, and an LCDR3 as set forth in SEQ ID NO:171. In some embodiments, the antibody or antigen binding fragment provided herein comprises an HCDR1, an HCDR2, and an HCDR3 as set forth in SEQ ID NO:172, and an LCDR1, an LCDR2, and an LCDR3 as set forth in SEQ ID NO: 173. In some embodiments, the antibody or antigen binding fragment provided herein comprises an HCDR1, an HCDR2, and an HCDR3 as set forth in SEQ ID NO:174, and an LCDR1, an LCDR2, and an LCDR3 as set forth in SEQ ID NO:175. In some embodiments, the antibody or antigen binding fragment provided herein comprises an HCDR1, an HCDR2, and an HCDR3 as set forth in SEQ ID NO:176, and an LCDR1, an LCDR2, and an LCDR3 as set forth in SEQ ID NO:177. In some embodiments, the antibody or antigen binding fragment provided herein comprises an HCDR1, an HCDR2, and an HCDR3 as set forth in SEQ ID NO:178, and an LCDR1, an LCDR2, and an LCDR3 as set forth in SEQ ID NO:179. In some embodiments, the antibody or antigen binding fragment provided herein comprises an HCDR1, an HCDR2, and an HCDR3 as set forth in SEQ ID NO: 180, and an LCDR1, an LCDR2, and an LCDR3 as set forth in SEQ ID NO:181. In some embodiments, the antibody or antigen binding fragment provided herein comprises an HCDR1, an HCDR2, and an HCDR3 as set forth in SEQ ID NO:182, and an LCDR1, an LCDR2, and an LCDR3 as set forth in SEQ ID NO:183. In some embodiments, the antibody or antigen binding fragment provided herein comprises an HCDR1, an HCDR2, and an HCDR3 as set forth in SEQ ID NO:186, and an LCDR1, an LCDR2, and an LCDR3 as set forth in SEQ ID NO:187. In some embodiments, the antibody or antigen binding fragment provided herein comprises an HCDR1, an HCDR2, and an HCDR3 as set forth in SEQ ID NO:188, and an LCDR1, an LCDR2, and an LCDR3 as set forth in SEQ ID NO: 189. In some embodiments, the antibody or antigen binding fragment provided herein comprises an HCDR1, an HCDR2, and an HCDR3 as set forth in SEQ ID NO:190, and an LCDR1, an LCDR2, and an LCDR3 as set forth in SEQ ID NO:191. In some embodiments, the antibody or antigen binding fragment provided herein comprises an HCDR1, an HCDR2, and an HCDR3 as set forth in SEQ ID NO:192, and an LCDR1, an LCDR2, and an LCDR3 as set forth in SEQ ID NO:193. In some embodiments, the antibody or antigen binding fragment provided herein comprises an HCDR1, an HCDR2, and an HCDR3 as set forth in SEQ ID NO:194, and an LCDR1, an LCDR2, and an LCDR3 as set forth in SEQ ID NO:195. In some embodiments, the antibody or antigen binding fragment provided herein comprises an HCDR1, an HCDR2, and an HCDR3 as set forth in SEQ ID NO: 196, and an LCDR1, an LCDR2, and an LCDR3 as set forth in SEQ ID NO:197. In some embodiments, the antibody or antigen binding fragment provided herein comprises an HCDR1, an HCDR2, and an HCDR3 as set forth in SEQ ID NO:198, and an LCDR1, an LCDR2, and an LCDR3 as set forth in SEQ ID NO:199. In some embodiments, the antibody or antigen binding fragment provided herein comprises an HCDR1, an HCDR2, and an HCDR3 as set forth in SEQ ID NO:200, and an LCDR1, an LCDR2, and an LCDR3 as set forth in SEQ ID NO:201. In some embodiments, the antibody or antigen binding fragment provided herein comprises an HCDR1, an HCDR2, and an HCDR3 as set forth in SEQ ID NO:202, and an LCDR1, an LCDR2, and an LCDR3 as set forth in SEQ ID NO:203. In some embodiments, the antibody or antigen binding fragment provided herein comprises an HCDR1, an HCDR2, and an HCDR3 as set forth in SEQ ID NO:204, and an LCDR1, an LCDR2, and an LCDR3 as set forth in SEQ ID NO:205. In some embodiments, the antibody or antigen binding fragment provided herein comprises an HCDR1, an HCDR2, and an HCDR3 as set forth in SEQ ID NO:206, and an LCDR1, an LCDR2, and an LCDR3 as set forth in SEQ ID NO:207. In some embodiments, the antibody or antigen binding fragment provided herein comprises an HCDR1, an HCDR2, and an HCDR3 as set forth in SEQ ID NO:208, and an LCDR1, an LCDR2, and an LCDR3 as set forth in SEQ ID NO:209. In some embodiments, the antibody or antigen binding fragment provided herein comprises an HCDR1, an HCDR2, and an HCDR3 as set forth in SEQ ID NO:210, and an LCDR1, an LCDR2, and an LCDR3 as set forth in SEQ ID NO:211. In some embodiments, the antibody or antigen binding fragment provided herein comprises an HCDR1, an HCDR2, and an HCDR3 as set forth in SEQ ID NO:212, and an LCDR1, an LCDR2, and an LCDR3 as set forth in SEQ ID NO:213. In some embodiments, the antibody or antigen binding fragment provided herein comprises an HCDR1, an HCDR2, and an HCDR3 as set forth in SEQ ID NO:214, and an LCDR1, an LCDR2, and an LCDR3 as set forth in SEQ ID NO:215. In some embodiments, the antibody or antigen binding fragment provided herein comprises an HCDR1, an HCDR2, and an HCDR3 as set forth in SEQ ID NO:216, and an LCDR1, an LCDR2, and an LCDR3 as set forth in SEQ ID NO:217. In some embodiments, the antibody or antigen binding fragment provided herein comprises an HCDR1, an HCDR2, and an HCDR3 as set forth in SEQ ID NO:218, and an LCDR1, an LCDR2, and an LCDR3 as set forth in SEQ ID NO:219. In some embodiments, the antibody or antigen binding fragment provided herein comprises an HCDR1, an HCDR2, and an HCDR3 as set forth in SEQ ID NO:220, and an LCDR1, an LCDR2, and an LCDR3 as set forth in SEQ ID NO:221. In some embodiments, the antibody or antigen binding fragment provided herein comprises an HCDR1, an HCDR2, and an HCDR3 as set forth in SEQ ID NO:222, and an LCDR1, an LCDR2, and an LCDR3 as set forth in SEQ ID NO:223. In some embodiments, the antibody or antigen binding fragment provided herein comprises an HCDR1, an HCDR2, and an HCDR3 as set forth in SEQ ID NO:226, and an LCDR1, an LCDR2, and an LCDR3 as set forth in SEQ ID NO:227. In some embodiments, the antibody or antigen binding fragment provided herein comprises an HCDR1, an HCDR2, and an HCDR3 as set forth in SEQ ID NO:228, and an LCDR1, an LCDR2, and an LCDR3 as set forth in SEQ ID NO:229. In some embodiments, the antibody or antigen binding fragment provided herein comprises an HCDR1, an HCDR2, and an HCDR3 as set forth in SEQ ID NO:230, and an LCDR1, an LCDR2, and an LCDR3 as set forth in SEQ ID NO:231. In some embodiments, the antibody or antigen binding fragment provided herein comprises an HCDR1, an HCDR2, and an HCDR3 as set forth in SEQ ID NO:232, and an LCDR1, an LCDR2, and an LCDR3 as set forth in SEQ ID NO:233. In some embodiments, the antibody or antigen binding fragment provided herein comprises an HCDR1, an HCDR2, and an HCDR3 as set forth in SEQ ID NO:234, and an LCDR1, an LCDR2, and an LCDR3 as set forth in SEQ ID NO:235. In some embodiments, the antibody or antigen binding fragment provided herein comprises an HCDR1, an HCDR2, and an HCDR3 as set forth in SEQ ID NO:236, and an LCDR1, an LCDR2, and an LCDR3 as set forth in SEQ ID NO:237. In some embodiments, the antibody or antigen binding fragment provided herein comprises an HCDR1, an HCDR2, and an HCDR3 as set forth in SEQ ID NO:238, and an LCDR1, an LCDR2, and an LCDR3 as set forth in SEQ ID NO:239. In some embodiments, the antibody or antigen binding fragment provided herein comprises an HCDR1, an HCDR2, and an HCDR3 as set forth in SEQ ID NO:240, and an LCDR1, an LCDR2, and an LCDR3 as set forth in SEQ ID NO:241. In some embodiments, the antibody or antigen binding fragment provided herein comprises an HCDR1, an HCDR2, and an HCDR3 as set forth in SEQ ID NO:246, and an LCDR1, an LCDR2, and an LCDR3 as set forth in SEQ ID NO:247. In some embodiments, the antibody or antigen binding fragment provided herein comprises an HCDR1, an HCDR2, and an HCDR3 as set forth in SEQ ID NO:248, and an LCDR1, an LCDR2, and an LCDR3 as set forth in SEQ ID NO:249. In some embodiments, the antibody or antigen binding fragment provided herein comprises an HCDR1, an HCDR2, and an HCDR3 as set forth in SEQ ID NO:250, and an LCDR1, an LCDR2, and an LCDR3 as set forth in SEQ ID NO:251. In some embodiments, the antibody or antigen binding fragment provided herein comprises an HCDR1, an HCDR2, and an HCDR3 as set forth in SEQ ID NO:252, and an LCDR1, an LCDR2, and an LCDR3 as set forth in SEQ ID NO:253. In some embodiments, the antibody or antigen binding fragment provided herein comprises an HCDR1, an HCDR2, and an HCDR3 as set forth in SEQ ID NO:254, and an LCDR1, an LCDR2, and an LCDR3 as set forth in SEQ ID NO:255. In some embodiments, the antibody or antigen binding fragment provided herein comprises an HCDR1, an HCDR2, and an HCDR3 as set forth in SEQ ID NO:256, and an LCDR1, an LCDR2, and an LCDR3 as set forth in SEQ ID NO:257. In some embodiments, the antibody or antigen binding fragment provided herein comprises an HCDR1, an HCDR2, and an HCDR3 as set forth in SEQ ID NO:258, and an LCDR1, an LCDR2, and an LCDR3 as set forth in SEQ ID NO:259. In some embodiments, the antibody or antigen binding fragment provided herein comprises an HCDR1, an HCDR2, and an HCDR3 as set forth in SEQ ID NO:260, and an LCDR1, an LCDR2, and an LCDR3 as set forth in SEQ ID NO:261. In some embodiments, the antibody or antigen binding fragment provided herein comprises an HCDR1, an HCDR2, and an HCDR3 as set forth in SEQ ID NO:262, and a LCDR1, an LCDR2, and an LCDR3 as set forth in SEQ ID NO:263. In some embodiments, the antibody or antigen binding fragment provided herein comprises an HCDR1, an HCDR2, and an HCDR3 as set forth in SEQ ID NO:264, and an LCDR1, an LCDR2, and an LCDR3 as set forth in SEQ ID NO:265. In some embodiments, the antibody or antigen binding fragment provided herein comprises an HCDR1, an HCDR2, and an HCDR3 as set forth in SEQ ID NO:268, and an LCDR1, an LCDR2, and an LCDR3 as set forth in SEQ ID NO:269. In some embodiments, the antibody or antigen binding fragment provided herein comprises an HCDR1, an HCDR2, and an HCDR3 as set forth in SEQ ID NO:786, and an LCDR1, an LCDR2, and an LCDR3 as set forth in SEQ ID NO:787. In some embodiments, the antibody or antigen binding fragment provided herein comprises an HCDR1, an HCDR2, and an HCDR3 as set forth in SEQ ID NO:788, and an LCDR1, an LCDR2, and an LCDR3 as set forth in SEQ ID NO:789. In some embodiments, the antibody or antigen binding fragment provided herein comprises an HCDR1, an HCDR2, and an HCDR3 as set forth in SEQ ID NO:790, and an LCDR1, an LCDR2, and an LCDR3 as set forth in SEQ ID NO:791. In some embodiments, the antibody or antigen binding fragment provided herein comprises an HCDR1, an HCDR2, and an HCDR3 as set forth in SEQ ID NO:792, and an LCDR1, an LCDR2, and an LCDR3 as set forth in SEQ ID NO:793. In some embodiments, the antibody or antigen binding fragment provided herein comprises an HCDR1, an HCDR2, and an HCDR3 as set forth in SEQ ID NO:798, and an LCDR1, an LCDR2, and an LCDR3 as set forth in SEQ ID NO:799. In some embodiments, the antibody or antigen binding fragment provided herein comprises an HCDR1, an HCDR2, and an HCDR3 as set forth in SEQ ID NO:806, and an LCDR1, an LCDR2, and an LCDR3 as set forth in SEQ ID NO:807. In some embodiments, the antibody or antigen binding fragment provided herein comprises an HCDR1, an HCDR2, and an HCDR3 as set forth in SEQ ID NO:808, and an LCDR1, an LCDR2, and an LCDR3 as set forth in SEQ ID NO:809. In some embodiments, the antibody or antigen binding fragment provided herein comprises an HCDR1, an HCDR2, and an HCDR3 as set forth in SEQ ID NO:810, and an LCDR1, an LCDR2, and an LCDR3 as set forth in SEQ ID NO:811. In some embodiments, the antibody or antigen binding fragment provided herein comprises an HCDR1, an HCDR2, and an HCDR3 as set forth in SEQ ID NO:812, and an LCDR1, an LCDR2, and an LCDR3 as set forth in SEQ ID NO:813. In some embodiments, the antibody or antigen binding fragment provided herein comprises an HCDR1, an HCDR2, and an HCDR3 as set forth in SEQ ID NO:814, and an LCDR1, an LCDR2, and an LCDR3 as set forth in SEQ ID NO:815. In some embodiments, the antibody or antigen binding fragment provided herein comprises an HCDR1, an HCDR2, and an HCDR3 as set forth in SEQ ID NO:816, and an LCDR1, an LCDR2, and an LCDR3 as set forth in SEQ ID NO:817. In some embodiments, the antibody or antigen binding fragment provided herein comprises an HCDR1, an HCDR2, and an HCDR3 as set forth in SEQ ID NO:818, and an LCDR1, an LCDR2, and an LCDR3 as set forth in SEQ ID NO:819. In some embodiments, the antibody or antigen binding fragment provided herein comprises an HCDR1, an HCDR2, and an HCDR3 as set forth in SEQ ID NO:820, and an LCDR1, an LCDR2, and an LCDR3 as set forth in SEQ ID NO:821. In some embodiments, the antibody or antigen binding fragment provided herein comprises an HCDR1, an HCDR2, and an HCDR3 as set forth in SEQ ID NO:822, and an LCDR1, an LCDR2, and an LCDR3 as set forth in SEQ ID NO:823. In some embodiments, the antibody or antigen binding fragment provided herein comprises an HCDR1, an HCDR2, and an HCDR3 as set forth in SEQ ID NO:824, and an LCDR1, an LCDR2, and an LCDR3 as set forth in SEQ ID NO:825. In some embodiments, the antibody or antigen binding fragment provided herein comprises an HCDR1, an HCDR2, and an HCDR3 as set forth in SEQ ID NO:826, and an LCDR1, an LCDR2, and an LCDR3 as set forth in SEQ ID NO:827. In some embodiments, the antibody or antigen binding fragment provided herein comprises an HCDR1, an HCDR2, and an HCDR3 as set forth in SEQ ID NO:828, and an LCDR1, an LCDR2, and an LCDR3 as set forth in SEQ ID NO:829. In some embodiments, the antibody or antigen binding fragment provided herein comprises an HCDR1, an HCDR2, and an HCDR3 as set forth in SEQ ID NO:830, and an LCDR1, an LCDR2, and an LCDR3 as set forth in SEQ ID NO:831. In some embodiments, the antibody or antigen binding fragment provided herein comprises an HCDR1, an HCDR2, and an HCDR3 as set forth in SEQ ID NO:832, and an LCDR1, an LCDR2, and an LCDR3 as set forth in SEQ ID NO:833. In some embodiments, the antibody or antigen binding fragment provided herein comprises an HCDR1, an HCDR2, and an HCDR3 as set forth in SEQ ID NO:836, and an LCDR1, an LCDR2, and an LCDR3 as set forth in SEQ ID NO:837. In some embodiments, the antibody or antigen binding fragment provided herein comprises an HCDR1, an HCDR2, and an HCDR3 as set forth in SEQ ID NO:838, and an LCDR1, an LCDR2, and an LCDR3 as set forth in SEQ ID NO:839. In some embodiments, the antibody or antigen binding fragment provided herein comprises an HCDR1, an HCDR2, and an HCDR3 as set forth in SEQ ID NO:840, and an LCDR1, an LCDR2, and an LCDR3 as set forth in SEQ ID NO:841. In some embodiments, the antibody or antigen binding fragment provided herein comprises an HCDR1, an HCDR2, and an HCDR3 as set forth in SEQ ID NO: 842, and an LCDR1, an LCDR2, and an LCDR3 as set forth in SEQ ID NO:843. In some embodiments, the antibody or antigen binding fragment provided herein comprises an HCDR1, an HCDR2, and an HCDR3 as set forth in SEQ ID NO:846, and an LCDR1, an LCDR2, and an LCDR3 as set forth in SEQ ID NO:847. In some embodiments, the antibody or antigen binding fragment provided herein comprises an HCDR1, an HCDR2, and an HCDR3 as set forth in SEQ ID NO:848, and an LCDR1, an LCDR2, and an LCDR3 as set forth in SEQ ID NO:849. In some embodiments, the antibody or antigen binding fragment provided herein comprises an HCDR1, an HCDR2, and an HCDR3 as set forth in SEQ ID NO:850, and an LCDR1, an LCDR2, and an LCDR3 as set forth in SEQ ID NO:851. In some embodiments, the antibody or antigen binding fragment provided herein comprises an HCDR1, an HCDR2, and an HCDR3 as set forth in SEQ ID NO:852, and an LCDR1, an LCDR2, and an LCDR3 as set forth in SEQ ID NO:853. In some embodiments, the antibody or antigen binding fragment provided herein comprises an HCDR1, an HCDR2, and an HCDR3 as set forth in SEQ ID NO:854, and an LCDR1, an LCDR2, and an LCDR3 as set forth in SEQ ID NO:855. In some embodiments, the antibody or antigen binding fragment provided herein comprises an HCDR1, an HCDR2, and an HCDR3 as set forth in SEQ ID NO:856, and an LCDR1, an LCDR2, and an LCDR3 as set forth in SEQ ID NO:857. In some embodiments, the antibody or antigen binding fragment provided herein comprises an HCDR1, an HCDR2, and an HCDR3 as set forth in SEQ ID NO:858, and an LCDR1, an LCDR2, and an LCDR3 as set forth in SEQ ID NO:859. In some embodiments, the antibody or antigen binding fragment provided herein comprises an HCDR1, an HCDR2, and an HCDR3 as set forth in SEQ ID NO:860, and an LCDR1, an LCDR2, and an LCDR3 as set forth in SEQ ID NO:861. In some embodiments, the antibody or antigen binding fragment provided herein comprises an HCDR1, an HCDR2, and an HCDR3 as set forth in SEQ ID NO:862, and an LCDR1, an LCDR2, and an LCDR3 as set forth in SEQ ID NO:863. In some embodiments, the antibody or antigen binding fragment provided herein comprises an HCDR1, an HCDR2, and an HCDR3 as set forth in SEQ ID NO:864, and an LCDR1, an LCDR2, and an LCDR3 as set forth in SEQ ID NO:865. In some embodiments, the antibody or antigen binding fragment provided herein comprises an HCDR1, an HCDR2, and an HCDR3 as set forth in SEQ ID NO:866, and an LCDR1, an LCDR2, and an LCDR3 as set forth in SEQ ID NO:867. In some embodiments, the antibody or antigen binding fragment provided herein comprises an HCDR1, an HCDR2, and an HCDR3 as set forth in SEQ ID NO:868, and an LCDR1, an LCDR2, and an LCDR3 as set forth in SEQ ID NO:869. In some embodiments, the antibody or antigen binding fragment provided herein comprises an HCDR1, an HCDR2, and an HCDR3 as set forth in SEQ ID NO:870, and an LCDR1, an LCDR2, and an LCDR3 as set forth in SEQ ID NO:871. In some embodiments, the antibody or antigen binding fragment provided herein comprises an HCDR1, an HCDR2, and an HCDR3 as set forth in SEQ ID NO:872, and an LCDR1, an LCDR2, and an LCDR3 as set forth in SEQ ID NO:873. In some embodiments, the antibody or antigen binding fragment provided herein comprises an HCDR1, an HCDR2, and an HCDR3 as set forth in SEQ ID NO:874, and an LCDR1, an LCDR2, and an LCDR3 as set forth in SEQ ID NO:875. In some embodiments, the antibody or antigen binding fragment provided herein comprises an HCDR1, an HCDR2, and an HCDR3 as set forth in SEQ ID NO:876, and an LCDR1, an LCDR2, and an LCDR3 as set forth in SEQ ID NO:877. In some embodiments, the antibody or antigen binding fragment provided herein comprises an HCDR1, an HCDR2, and an HCDR3 as set forth in SEQ ID NO:878, and an LCDR1, an LCDR2, and an LCDR3 as set forth in SEQ ID NO:879. In some embodiments, the antibody or antigen binding fragment provided herein comprises an HCDR1, an HCDR2, and an HCDR3 as set forth in SEQ ID NO:880, and an LCDR1, an LCDR2, and an LCDR3 as set forth in SEQ ID NO:881. In some embodiments, the antibody or antigen binding fragment provided herein comprises an HCDR1, an HCDR2, and an HCDR3 as set forth in SEQ ID NO:882, and an LCDR1, an LCDR2, and an LCDR3 as set forth in SEQ ID NO:883. In some embodiments, the antibody or antigen binding fragment provided herein comprises an HCDR1, an HCDR2, and an HCDR3 as set forth in SEQ ID NO:884, and an LCDR1, an LCDR2, and an LCDR3 as set forth in SEQ ID NO:885. In some embodiments, the antibody or antigen binding fragment provided herein comprises an HCDR1, an HCDR2, and an HCDR3 as set forth in SEQ ID NO:886, and an LCDR1, an LCDR2, and an LCDR3 as set forth in SEQ ID NO:887. In some embodiments, the antibody or antigen binding fragment provided herein comprises an HCDR1, an HCDR2, and an HCDR3 as set forth in SEQ ID NO:888, and an LCDR1, an LCDR2, and an LCDR3 as set forth in SEQ ID NO:889. In some embodiments, the antibody or antigen binding fragment provided herein comprises an HCDR1, an HCDR2, and an HCDR3 as set forth in SEQ ID NO:890, and an LCDR1, an LCDR2, and an LCDR3 as set forth in SEQ ID NO:891. CDR sequences can be determined according to well-known numbering systems or a combination thereof. In some embodiments, the CDRs are according to IMGT numbering. In some embodiments, the CDRs are according to Kabat numbering. In some embodiments, the CDRs are according to AbM numbering. In other embodiments, the CDRs are according to Chothia numbering. In other embodiments, the CDRs are according to Contact numbering. In other embodiments, provided herein is an antibody that binds to IL-23R comprising an HCDR1 comprising an amino acid sequence having at least 75%, 80%, 85%, 86%, 87%, 88%, 89%, 90%, 91%, 92%, 93%, 94%, 95%, 96%, 97%, 98%, 99%, or 100% sequence identity to any of SEQ ID NOs: 276, 288, 294, 306, 312, 318, 324, 330, 336, 342, 348, 354, 360, 366, 372, 378, 384, 390, 396, 402, 408, 420, 426, 432, 438, 444, 450, 456, 462, 468, 474, 480, 486, 492, 498, 504, 510, 516, 522, 528, 540, 546, 552, 558, 564, 570, 576, 582, 600, 606, 612, 618, 624, 630, 636, 642, 648, 654, 666, 900, 906, 912, 918, 936, 960, 966, 972, 978, 984, 990, 996, 1002, 1008, 1014, 1020, 1026, 1032, 1038, 1050, 1056, 1062, 1068, 1080, 1086, 1092, 1098, 1104, 1110, 1116, 1122, 1128, 1134, 1140, 1146, 1152, 1158, 1164, 1170, 1176, 1182, 1188, 1194, 1200, 1206 and 1212; (ii) an HCDR2 comprising an amino acid sequence having at least 75%, 80%, 85%, 86%, 87%, 88%, 89%, 90%, 91%, 92%, 93%, 94%, 95%, 96%, 97%, 98%, 99%, or 100% sequence identity to any of SEQ ID NOs: 277, 289, 295, 307, 313, 319, 325, 331, 337, 343, 349, 355, 361, 367, 373, 379, 385, 391, 397, 403, 409, 421, 427, 433, 439, 445, 451, 457, 463, 469, 475, 481, 487, 493, 499, 505, 511, 517, 523, 529, 541, 547, 553, 559, 565, 571, 577, 583, 601, 607, 613, 619, 625, 631, 637, 643, 649, 655, 667, 901, 907, 913, 919, 937, 961, 967, 973, 979, 985, 991, 997, 1003, 1009, 1015, 1021, 1027, 1033, 1039, 1051, 1057, 1063, 1069, 1081, 1087, 1093, 1099, 1105, 1111, 1117, 1123, 1129, 1135, 1141, 1147, 1153, 1159, 1165, 1171, 1177, 1183, 1189, 1195, 1201, 1207 and 1213, (iii) an HCDR3 comprising an amino acid sequence having at least 75%, 80%, 85%, 86%, 87%, 88%, 89%, 90%, 91%, 92%, 93%, 94%, 95%, 96%, 97%, 98%, 99%, or 100% sequence identity to SEQ ID NO: 278, 290, 296, 308, 314, 320, 326, 332, 338, 344, 350, 356, 362, 368, 374, 380, 386, 392, 398, 404, 410, 422, 428, 434, 440, 446, 452, 458, 464, 470, 476, 482, 488, 494, 500, 506, 512, 518, 524, 530, 542, 548, 554, 560, 566, 572, 578, 584, 602, 608, 614, 620, 626, 632, 638, 644, 650, 656, 668, 902, 908, 914, 920, 938, 962, 968, 974, 980, 986, 992, 998, 1004, 1010, 1016, 1022, 1028, 1034, 1040, 1052, 1058, 1064, 1070, 1082, 1088, 1094, 1100, 1106, 1112, 1118, 1124, 1130, 1136, 1142, 1148, 1154, 1160, 1166, 1172, 1178, 1184, 1190, 1196, 1202, 1208 and 1214; (iv) a LCDR1 comprising an amino acid sequence having at least 75%, 80%, 85%, 86%, 87%, 88%, 89%, 90%, 91%, 92%, 93%, 94%, 95%, 96%, 97%, 98%, 99%, or 100% sequence identity to any of SEQ ID NOs: 279, 291, 297, 309, 315, 321, 327, 333, 339, 345, 351, 357, 363, 369, 375, 381, 387, 393, 399, 405, 411, 423, 429, 435, 441, 447, 453, 459, 465, 471, 477, 483, 489, 495, 501, 507, 513, 519, 525, 531, 543, 549, 555, 561, 567, 573, 579, 585, 603, 609, 615, 621, 627, 633, 639, 645, 651, 657, 669, 903, 909, 915, 921, 939, 963, 969, 975, 981, 987, 993, 999, 1005, 1011, 1017, 1023, 1029, 1035, 1041, 1053, 1059, 1065, 1071, 1083, 1089, 1095, 1101, 1107, 1113, 1119, 1125, 1131, 1137, 1143, 1149, 1155, 1161, 1167, 1173, 1179, 1185, 1191, 1197, 1203, 1209 and 1215; (v) a LCDR2 comprising an amino acid sequence having at least 75%, 80%, 85%, 86%, 87%, 88%, 89%, 90%, 91%, 92%, 93%, 94%, 95%, 96%, 97%, 98%, 99%, or 100% sequence identity to any of SEQ ID NOs: 280, 292, 298, 310, 316, 322, 328, 334, 340, 346, 352, 358, 364, 370, 376, 382, 388, 394, 400, 406, 412, 424, 430, 436, 442, 448, 454, 460, 466, 472, 478, 484, 490, 496, 502, 508, 514, 520, 526, 532, 544, 550, 556, 562, 568, 574, 580, 586, , 604, 610, 616, 622, 628, 634, 640, 646, 652, 658, 670, 904, 910, 916, 922, 940, 964, 970, 976, 982, 988, 994, 1000, 1006, 1012, 1018, 1024, 1030, 1036, 1042, 1054, 1060, 1066, 1072, 1084, 1090, 1096, 1102, 1108, 1114, 1120, 1126, 1132, 1138, 1144, 1150, 1156, 1162, 1168, 1174, 1180, 1186, 1192, 1198, 1204, 1210 and 1216; and/or (vi) a LCDR3 comprising an amino acid sequence having at least 75%, 80%, 85%, 86%, 87%, 88%, 89%, 90%, 91%, 92%, 93%, 94%, 95%, 96%, 97%, 98%, 99%, 100% sequence identity to any of SEQ ID NOs: 281, 293, 299, 311, 317, 323, 329, 335, 341, 347, 353, 359, 365, 371, 377, 383, 389, 395, 401, 407, 413, 425, 431, 437, 443, 449, 455, 461, 467, 473, 479, 485, 491, 497, 503, 509, 515, 521, 527, 533, 545, 551, 557, 563, 569, 575, 581, 587, 605, 611, 617, 623, 629, 635, 641, 647, 653, 659, 671, 905, 911, 917, 923, 941, 965, 971, 977, 983, 989, 995, 1001, 1007, 1013, 1019, 1025, 1031, 1037, 1043, 1055, 1061, 1067, 1073, 1085, 1091, 1097, 1103, 1109, 1115, 1121, 1127, 1133, 1139, 1145, 1151, 1157, 1163, 1169, 1175, 1181, 1187, 1193, 1199, 1205, 1211 and 1217. In some embodiments, the anti-IL-23R antibody is humanized. In some embodiments, the anti-IL-23R antibody comprises an acceptor human framework, e.g., a human immunoglobulin framework or a human consensus framework.

[0698] In some specific embodiments, provided herein is an antibody that binds to IL-23R, comprising: (i) a VH comprising an HCDR1, an HCDR2, and an HCDR3 having an amino acid sequence of SEQ ID NOs:276, 277, and 278, respectively, and (ii) an VL comprising an LCDR1, an LCDR2, and an LCDR3 having an amino acid sequence of SEQ ID NOs:279, 280, and 281, respectively. In some specific embodiments, provided herein is an antibody that binds to IL-23R, comprising: (i) a VH comprising an HCDR1, an HCDR2, and an HCDR3 having an amino acid sequence of SEQ ID NOs:288, 289, and 290, respectively, and (ii) an VL comprising an LCDR1, an LCDR2, and an LCDR3 having an amino acid sequence of SEQ ID NOs:291, 292, and 293, respectively. In some specific embodiments, provided herein is an antibody that binds to IL-23R, comprising: (i) a VH comprising an HCDR1, an HCDR2, and an HCDR3 having an amino acid sequence of SEQ ID NOs:294, 295, and 296, respectively, and (ii) an VL comprising an LCDR1, an LCDR2, and an LCDR3 having an amino acid sequence of SEQ ID NOs:297, 298, and 299, respectively. In some specific embodiments, provided herein is an antibody that binds to IL-23R, comprising: (i) a VH comprising an HCDR1, an HCDR2, and an HCDR3 having an amino acid sequence of SEQ ID NOs:306, 307, and 308, respectively, and (ii) an VL comprising an LCDR1, an LCDR2, and an LCDR3 having an amino acid sequence of SEQ ID NOs:309, 310, and 311, respectively. In some specific embodiments, provided herein is an antibody that binds to IL-23R, comprising: (i) a VH comprising an HCDR1, an HCDR2, and an HCDR3 having an amino acid sequence of SEQ ID NOs:312, 313, and 314, respectively, and (ii) an VL comprising an LCDR1, an LCDR2, and an LCDR3 having an amino acid sequence of SEQ ID NOs:315, 316, and 317, respectively. In some specific embodiments, provided herein is an antibody that binds to IL-23R, comprising: (i) a VH comprising an HCDR1, an HCDR2, and an HCDR3 having an amino acid sequence of SEQ ID NOs:318, 319, and 320, respectively, and (ii) an VL comprising an LCDR1, an LCDR2, and an LCDR3 having an amino acid sequence of SEQ ID NOs:321, 322, and 323, respectively. In some specific embodiments, provided herein is an antibody that binds to IL-23R, comprising: (i) a VH comprising an HCDR1, an HCDR2, and an HCDR3 having an amino acid sequence of SEQ ID NOs:324, 325, and 326, respectively, and (ii) an VL comprising an LCDR1, an LCDR2, and an LCDR3 having an amino acid sequence of SEQ ID NOs:327, 328, and 329, respectively. In some specific embodiments, provided herein is an antibody that binds to IL-23R, comprising: (i) a VH comprising an HCDR1, an HCDR2, and an HCDR3 having an amino acid sequence of SEQ ID NOs:330, 331, and 332, respectively, and (ii) an VL comprising an LCDR1, an LCDR2, and an LCDR3 having an amino acid sequence of SEQ ID NOs:333, 334, and 335, respectively. In some specific embodiments, provided herein is an antibody that binds to IL-23R, comprising: (i) a VH comprising an HCDR1, an HCDR2, and an HCDR3 having an amino acid sequence of SEQ ID NOs:336, 337, and 338, respectively, and (ii) an VL comprising an LCDR1, an LCDR2, and an LCDR3 having an amino acid sequence of SEQ ID NOs:339, 340, and 341, respectively. In some specific embodiments, provided herein is an antibody that binds to IL-23R, comprising: (i) a VH comprising an HCDR1, an HCDR2, and an HCDR3 having an amino acid sequence of SEQ ID NOs:342, 343, and 344, respectively, and (ii) an VL comprising an LCDR1, an LCDR2, and an LCDR3 having an amino acid sequence of SEQ ID NOs:345, 346, and 347, respectively. In some specific embodiments, provided herein is an antibody that binds to IL-23R, comprising: (i) a VH comprising an HCDR1, an HCDR2, and an HCDR3 having an amino acid sequence of SEQ ID NOs:348, 349, and 350, respectively, and (ii) an VL comprising an LCDR1, an LCDR2, and an LCDR3 having an amino acid sequence of SEQ ID NOs:351, 352, and 353, respectively. In some specific embodiments, provided herein is an antibody that binds to IL-23R, comprising: (i) a VH comprising an HCDR1, an HCDR2, and an HCDR3 having an amino acid sequence of SEQ ID NOs:354, 355, and 356, respectively, and (ii) an VL comprising an LCDR1, an LCDR2, and an LCDR3 having an amino acid sequence of SEQ ID NOs:357, 358, and 359, respectively. In some specific embodiments, provided herein is an antibody that binds to IL-23R, comprising: (i) a VH comprising an HCDR1, an HCDR2, and an HCDR3 having an amino acid sequence of SEQ ID NOs:360, 361, and 362, respectively, and (ii) an VL comprising an LCDR1, an LCDR2, and an LCDR3 having an amino acid sequence of SEQ ID NOs:363, 364, and 365, respectively. In some specific embodiments, provided herein is an antibody that binds to IL-23R, comprising: (i) a VH comprising an HCDR1, an HCDR2, and an HCDR3 having an amino acid sequence of SEQ ID NOs:366, 367, and 368, respectively, and (ii) an VL comprising an LCDR1, an LCDR2, and an LCDR3 having an amino acid sequence of SEQ ID NOs:369, 370, and 371, respectively. In some specific embodiments, provided herein is an antibody that binds to IL-23R, comprising: (i) a VH comprising an HCDR1, an HCDR2, and an HCDR3 having an amino acid sequence of SEQ ID NOs:372, 373, and 374, respectively, and (ii) an VL comprising an LCDR1, an LCDR2, and an LCDR3 having an amino acid sequence of SEQ ID NOs:375, 376, and 377, respectively. In some specific embodiments, provided herein is an antibody that binds to IL-23R, comprising: (i) a VH comprising an HCDR1, an HCDR2, and an HCDR3 having an amino acid sequence of SEQ ID NOs:378, 379, and 380, respectively, and (ii) an VL comprising an LCDR1, an LCDR2, and an LCDR3 having an amino acid sequence of SEQ ID NOs:381, 382, and 383, respectively. In some specific embodiments, provided herein is an antibody that binds to IL-23R, comprising: (i) a VH comprising an HCDR1, an HCDR2, and an HCDR3 having an amino acid sequence of SEQ ID NOs:384, 385, and 386, respectively, and (ii) an VL comprising an LCDR1, an LCDR2, and an LCDR3 having an amino acid sequence of SEQ ID NOs:387, 388, and 389, respectively. In some specific embodiments, provided herein is an antibody that binds to IL-23R, comprising: (i) a VH comprising an HCDR1, an HCDR2, and an HCDR3 having an amino acid sequence of SEQ ID NOs:390, 391, and 392, respectively, and (ii) an VL comprising an LCDR1, an LCDR2, and an LCDR3 having an amino acid sequence of SEQ ID NOs:393, 394, and 395, respectively. In some specific embodiments, provided herein is an antibody that binds to IL-23R, comprising: (i) a VH comprising an HCDR1, an HCDR2, and an HCDR3 having an amino acid sequence of SEQ ID NOs:396, 397, and 398, respectively, and (ii) an VL comprising an LCDR1, an LCDR2, and an LCDR3 having an amino acid sequence of SEQ ID NOs:399, 400, and 401, respectively. In some specific embodiments, provided herein is an antibody that binds to IL-23R, comprising: (i) a VH comprising an HCDR1, an HCDR2, and an HCDR3 having an amino acid sequence of SEQ ID NOs:402, 403, and 404, respectively, and (ii) an VL comprising an LCDR1, an LCDR2, and an LCDR3 having an amino acid sequence of SEQ ID NOs:405, 406, and 407, respectively. In some specific embodiments, provided herein is an antibody that binds to IL-23R, comprising: (i) a VH comprising an HCDR1, an HCDR2, and an HCDR3 having an amino acid sequence of SEQ ID NOs:408, 409, and 410, respectively, and (ii) an VL comprising an LCDR1, an LCDR2, and an LCDR3 having an amino acid sequence of SEQ ID NOs:411, 412, and 413, respectively. In some specific embodiments, provided herein is an antibody that binds to IL-23R, comprising: (i) a VH comprising an HCDR1, an HCDR2, and an HCDR3 having an amino acid sequence of SEQ ID NOs:420, 421, and 422, respectively, and (ii) an VL comprising an LCDR1, an LCDR2, and an LCDR3 having an amino acid sequence of SEQ ID NOs:423, 424, and 425, respectively. In some specific embodiments, provided herein is an antibody that binds to IL-23R, comprising: (i) a VH comprising an HCDR1, an HCDR2, and an HCDR3 having an amino acid sequence of SEQ ID NOs:426, 427, and 428, respectively, and (ii) an VL comprising an LCDR1, an LCDR2, and an LCDR3 having an amino acid sequence of SEQ ID NOs:429, 430, and 431, respectively. In some specific embodiments, provided herein is an antibody that binds to IL-23R, comprising: (i) a VH comprising an HCDR1, an HCDR2, and an HCDR3 having an amino acid sequence of SEQ ID NOs:432, 433, and 434, respectively, and (ii) an VL comprising an LCDR1, an LCDR2, and an LCDR3 having an amino acid sequence of SEQ ID NOs:435, 436, and 437, respectively. In some specific embodiments, provided herein is an antibody that binds to IL-23R, comprising: (i) a VH comprising an HCDR1, an HCDR2, and an HCDR3 having an amino acid sequence of SEQ ID NOs:438, 439, and 440, respectively, and (ii) an VL comprising an LCDR1, an LCDR2, and an LCDR3 having an amino acid sequence of SEQ ID NOs:441, 442, and 443, respectively. In some specific embodiments, provided herein is an antibody that binds to IL-23R, comprising: (i) a VH comprising an HCDR1, an HCDR2, and an HCDR3 having an amino acid sequence of SEQ ID NOs:444, 445, and 446, respectively, and (ii) an VL comprising an LCDR1, an LCDR2, and an LCDR3 having an amino acid sequence of SEQ ID NOs:447, 448, and 449, respectively. In some specific embodiments, provided herein is an antibody that binds to IL-23R, comprising: (i) a VH comprising an HCDR1, an HCDR2, and an HCDR3 having an amino acid sequence of SEQ ID NOs:450, 451, and 452, respectively, and (ii) an VL comprising an LCDR1, an LCDR2, and an LCDR3 having an amino acid sequence of SEQ ID NOs:453, 454, and 455, respectively. In some specific embodiments, provided herein is an antibody that binds to IL-23R, comprising: (i) a VH comprising an HCDR1, an HCDR2, and an HCDR3 having an amino acid sequence of SEQ ID NOs:456, 457, and 458, respectively, and (ii) an VL comprising an LCDR1, an LCDR2, and an LCDR3 having an amino acid sequence of SEQ ID NOs:459, 460, and 461, respectively. In some specific embodiments, provided herein is an antibody that binds to IL-23R, comprising: (i) a VH comprising an HCDR1, an HCDR2, and an HCDR3 having an amino acid sequence of SEQ ID NOs:462, 463, and 464, respectively, and (ii) an VL comprising an LCDR1, an LCDR2, and an LCDR3 having an amino acid sequence of SEQ ID NOs:465, 466, and 467, respectively. In some specific embodiments, provided herein is an antibody that binds to IL-23R, comprising: (i) a VH comprising an HCDR1, an HCDR2, and an HCDR3 having an amino acid sequence of SEQ ID NOs:468, 469, and 470, respectively, and (ii) an VL comprising an LCDR1, an LCDR2, and an LCDR3 having an amino acid sequence of SEQ ID NOs:471, 472, and 473, respectively. In some specific embodiments, provided herein is an antibody that binds to IL-23R, comprising: (i) a VH comprising an HCDR1, an HCDR2, and an HCDR3 having an amino acid sequence of SEQ ID NOs:474, 475, and 476, respectively, and (ii) an VL comprising an LCDR1, an LCDR2, and an LCDR3 having an amino acid sequence of SEQ ID NOs:477, 478, and 479, respectively. In some specific embodiments, provided herein is an antibody that binds to IL-23R, comprising: (i) a VH comprising an HCDR1, an HCDR2, and an HCDR3 having an amino acid sequence of SEQ ID NOs:480, 481, and 482, respectively, and (ii) an VL comprising an LCDR1, an LCDR2, and an LCDR3 having an amino acid sequence of SEQ ID NOs:483, 484, and 485, respectively. In some specific embodiments, provided herein is an antibody that binds to IL-23R, comprising: (i) a VH comprising an HCDR1, an HCDR2, and an HCDR3 having an amino acid sequence of SEQ ID NOs:486, 487, and 488, respectively, and (ii) an VL comprising an LCDR1, an LCDR2, and an LCDR3 having an amino acid sequence of SEQ ID NOs:489, 490, and 491, respectively. In some specific embodiments, provided herein is an antibody that binds to IL-23R, comprising: (i) a VH comprising an HCDR1, an HCDR2, and an HCDR3 having an amino acid sequence of SEQ ID NOs:492, 493, and 494, respectively, and (ii) an VL comprising an LCDR1, an LCDR2, and an LCDR3 having an amino acid sequence of SEQ ID NOs:495, 496, and 497, respectively. In some specific embodiments, provided herein is an antibody that binds to IL-23R, comprising: (i) a VH comprising an HCDR1, an HCDR2, and an HCDR3 having an amino acid sequence of SEQ ID NOs:498, 499, and 500, respectively, and (ii) an VL comprising an LCDR1, an LCDR2, and an LCDR3 having an amino acid sequence of SEQ ID NOs:501, 502, and 503, respectively. In some specific embodiments, provided herein is an antibody that binds to IL-23R, comprising: (i) a VH comprising an HCDR1, an HCDR2, and an HCDR3 having an amino acid sequence of SEQ ID NOs:504, 505, and 506, respectively, and (ii) an VL comprising an LCDR1, an LCDR2, and an LCDR3 having an amino acid sequence of SEQ ID NOs:507, 508, and 509, respectively. In some specific embodiments, provided herein is an antibody that binds to IL-23R, comprising: (i) a VH comprising an HCDR1, an HCDR2, and an HCDR3 having an amino acid sequence of SEQ ID NOs:510, 511, and 512, respectively, and (ii) an VL comprising an LCDR1, an LCDR2, and an LCDR3 having an amino acid sequence of SEQ ID NOs:513, 514, and 515, respectively. In some specific embodiments, provided herein is an antibody that binds to IL-23R, comprising: (i) a VH comprising an HCDR1, an HCDR2, and an HCDR3 having an amino acid sequence of SEQ ID NOs:516, 517, and 518, respectively, and (ii) an VL comprising an LCDR1, an LCDR2, and an LCDR3 having an amino acid sequence of SEQ ID NOs:519, 520, and 521, respectively. In some specific embodiments, provided herein is an antibody that binds to IL-23R, comprising: (i) a VH comprising an HCDR1, an HCDR2, and an HCDR3 having an amino acid sequence of SEQ ID NOs:522, 523, and 524, respectively, and (ii) an VL comprising an LCDR1, an LCDR2, and an LCDR3 having an amino acid sequence of SEQ ID NOs:525, 526, and 527, respectively. In some specific embodiments, provided herein is an antibody that binds to IL-23R, comprising: (i) a VH comprising an HCDR1, an HCDR2, and an HCDR3 having an amino acid sequence of SEQ ID NOs:528, 529, and 530, respectively, and (ii) an VL comprising an LCDR1, an LCDR2, and an LCDR3 having an amino acid sequence of SEQ ID NOs:531, 532, and 533, respectively. In some specific embodiments, provided herein is an antibody that binds to IL-23R, comprising: (i) a VH comprising an HCDR1, an HCDR2, and an HCDR3 having an amino acid sequence of SEQ ID NOs:540, 541, and 542, respectively, and (ii) an VL comprising an LCDR1, an LCDR2, and an LCDR3 having an amino acid sequence of SEQ ID NOs:543, 544, and 545, respectively. In some specific embodiments, provided herein is an antibody that binds to IL-23R, comprising: (i) a VH comprising an HCDR1, an HCDR2, and an HCDR3 having an amino acid sequence of SEQ ID NOs:546, 547, and 548, respectively, and (ii) an VL comprising an LCDR1, an LCDR2, and an LCDR3 having an amino acid sequence of SEQ ID NOs:549, 550, and 551, respectively. In some specific embodiments, provided herein is an antibody that binds to IL-23R, comprising: (i) a VH comprising an HCDR1, an HCDR2, and an HCDR3 having an amino acid sequence of SEQ ID NOs:552, 553, and 554, respectively, and (ii) an VL comprising an LCDR1, an LCDR2, and an LCDR3 having an amino acid sequence of SEQ ID NOs:555, 556, and 557, respectively. In some specific embodiments, provided herein is an antibody that binds to IL-23R, comprising: (i) a VH comprising an HCDR1, an HCDR2, and an HCDR3 having an amino acid sequence of SEQ ID NOs:558, 559, and 560, respectively, and (ii) an VL comprising an LCDR1, an LCDR2, and an LCDR3 having an amino acid sequence of SEQ ID NOs:561, 562, and 563, respectively. In some specific embodiments, provided herein is an antibody that binds to IL-23R, comprising: (i) a VH comprising an HCDR1, an HCDR2, and an HCDR3 having an amino acid sequence of SEQ ID NOs:564, 565, and 566, respectively, and (ii) an VL comprising an LCDR1, an LCDR2, and an LCDR3 having an amino acid sequence of SEQ ID NOs:567, 568, and 569, respectively. In some specific embodiments, provided herein is an antibody that binds to IL-23R, comprising: (i) a VH comprising an HCDR1, an HCDR2, and an HCDR3 having an amino acid sequence of SEQ ID NOs:570, 571, and 572, respectively, and (ii) an VL comprising an LCDR1, an LCDR2, and an LCDR3 having an amino acid sequence of SEQ ID NOs:573, 574, and 575, respectively. In some specific embodiments, provided herein is an antibody that binds to IL-23R, comprising: (i) a VH comprising an HCDR1, an HCDR2, and an HCDR3 having an amino acid sequence of SEQ ID NOs:576, 577, and 578, respectively, and (ii) an VL comprising an LCDR1, an LCDR2, and an LCDR3 having an amino acid sequence of SEQ ID NOs:579, 580, and 581, respectively. In some specific embodiments, provided herein is an antibody that binds to IL-23R, comprising: (i) a VH comprising an HCDR1, an HCDR2, and an HCDR3 having an amino acid sequence of SEQ ID NOs:582, 583, and 584, respectively, and (ii) an VL comprising an LCDR1, an LCDR2, and an LCDR3 having an amino acid sequence of SEQ ID NOs:585, 586, and 587, respectively. In some specific embodiments, provided herein is an antibody that binds to IL-23R, comprising: (i) a VH comprising an HCDR1, an HCDR2, and an HCDR3 having an amino acid sequence of SEQ ID NOs:600, 601, and 602, respectively, and (ii) an VL comprising an LCDR1, an LCDR2, and an LCDR3 having an amino acid sequence of SEQ ID NOs:603, 604, and 605, respectively. In some specific embodiments, provided herein is an antibody that binds to IL-23R, comprising: (i) a VH comprising an HCDR1, an HCDR2, and an HCDR3 having an amino acid sequence of SEQ ID NOs:606, 607, and 608, respectively, and (ii) an VL comprising an LCDR1, an LCDR2, and an LCDR3 having an amino acid sequence of SEQ ID NOs:609, 610, and 611, respectively. In some specific embodiments, provided herein is an antibody that binds to IL-23R, comprising: (i) a VH comprising an HCDR1, an HCDR2, and an HCDR3 having an amino acid sequence of SEQ ID NOs:612, 613, and 614, respectively, and (ii) an VL comprising an LCDR1, an LCDR2, and an LCDR3 having an amino acid sequence of SEQ ID NOs:615, 616, and 617, respectively. In some specific embodiments, provided herein is an antibody that binds to IL-23R, comprising: (i) a VH comprising an HCDR1, an HCDR2, and an HCDR3 having an amino acid sequence of SEQ ID NOs:618, 619, and 620, respectively, and (ii) an VL comprising an LCDR1, an LCDR2, and an LCDR3 having an amino acid sequence of SEQ ID NOs:621, 622, and 623, respectively. In some specific embodiments, provided herein is an antibody that binds to IL-23R, comprising: (i) a VH comprising an HCDR1, an HCDR2, and an HCDR3 having an amino acid sequence of SEQ ID NOs:624, 625, and 626, respectively, and (ii) an VL comprising an LCDR1, an LCDR2, and an LCDR3 having an amino acid sequence of SEQ ID NOs:627, 628, and 629, respectively. In some specific embodiments, provided herein is an antibody that binds to IL-23R, comprising: (i) a VH comprising an HCDR1, an HCDR2, and an HCDR3 having an amino acid sequence of SEQ ID NOs:630, 631, and 632, respectively, and (ii) an VL comprising an LCDR1, an LCDR2, and an LCDR3 having an amino acid sequence of SEQ ID NOs:633, 634, and 635, respectively. In some specific embodiments, provided herein is an antibody that binds to IL-23R, comprising: (i) a VH comprising an HCDR1, an HCDR2, and an HCDR3 having an amino acid sequence of SEQ ID NOs:636, 637, and 638, respectively, and (ii) an VL comprising an LCDR1, an LCDR2, and an LCDR3 having an amino acid sequence of SEQ ID NOs:639, 640, and 641, respectively. In some specific embodiments, provided herein is an antibody that binds to IL-23R, comprising: (i) a VH comprising an HCDR1, an HCDR2, and an HCDR3 having an amino acid sequence of SEQ ID NOs:642, 643, and 644, respectively, and (ii) an VL comprising an LCDR1, an LCDR2, and an LCDR3 having an amino acid sequence of SEQ ID NOs:645, 646, and 647, respectively. In some specific embodiments, provided herein is an antibody that binds to IL-23R, comprising: (i) a VH comprising an HCDR1, an HCDR2, and an HCDR3 having an amino acid sequence of SEQ ID NOs:648, 649, and 650, respectively, and (ii) an VL comprising an LCDR1, an LCDR2, and an LCDR3 having an amino acid sequence of SEQ ID NOs:651, 652, and 653, respectively. In some specific embodiments, provided herein is an antibody that binds to IL-23R, comprising: (i) a VH comprising an HCDR1, an HCDR2, and an HCDR3 having an amino acid sequence of SEQ ID NOs:654, 655, and 656, respectively, and (ii) an VL comprising an LCDR1, an LCDR2, and an LCDR3 having an amino acid sequence of SEQ ID NOs:657, 658, and 659, respectively. In some specific embodiments, provided herein is an antibody that binds to IL-23R, comprising: (i) a VH comprising an HCDR1, an HCDR2, and an HCDR3 having an amino acid sequence of SEQ ID NOs:666, 667, and 668, respectively, and (ii) an VL comprising an LCDR1, an LCDR2, and an LCDR3 having an amino acid sequence of SEQ ID NOs:669, 670, and 671, respectively. In some specific embodiments, provided herein is an antibody that binds to IL-23R, comprising: (i) a VH comprising an HCDR1, an HCDR2, and an HCDR3 having an amino acid sequence of SEQ ID NOs:900, 901, and 902, respectively, and (ii) an VL comprising an LCDR1, an LCDR2, and an LCDR3 having an amino acid sequence of SEQ ID NOs:903, 904, and 905, respectively. In some specific embodiments, provided herein is an antibody that binds to IL-23R, comprising: (i) a VH comprising an HCDR1, an HCDR2, and an HCDR3 having an amino acid sequence of SEQ ID NOs:906, 907, and 908, respectively, and (ii) an VL comprising an LCDR1, an LCDR2, and an LCDR3 having an amino acid sequence of SEQ ID NOs:909, 910, and 911, respectively. In some specific embodiments, provided herein is an antibody that binds to IL-23R, comprising: (i) a VH comprising an HCDR1, an HCDR2, and an HCDR3 having an amino acid sequence of SEQ ID NOs:912, 913, and 914, respectively, and (ii) an VL comprising an LCDR1, an LCDR2, and an LCDR3 having an amino acid sequence of SEQ ID NOs:915, 916, and 917, respectively. In some specific embodiments, provided herein is an antibody that binds to IL-23R, comprising: (i) a VH comprising an HCDR1, an HCDR2, and an HCDR3 having an amino acid sequence of SEQ ID NOs:918, 919, and 920, respectively, and (ii) an VL comprising an LCDR1, an LCDR2, and an LCDR3 having an amino acid sequence of SEQ ID NOs:921, 922, and 923, respectively. In some specific embodiments, provided herein is an antibody that binds to IL-23R, comprising: (i) a VH comprising an HCDR1, an HCDR2, and an HCDR3 having an amino acid sequence of SEQ ID NOs:936, 937, and 938, respectively, and (ii) an VL comprising an LCDR1, an LCDR2, and an LCDR3 having an amino acid sequence of SEQ ID NOs:939, 940, and 941, respectively. In some specific embodiments, provided herein is an antibody that binds to IL-23R, comprising: (i) a VH comprising an HCDR1, an HCDR2, and an HCDR3 having an amino acid sequence of SEQ ID NOs:960, 961, and 962, respectively, and (ii) an VL comprising an LCDR1, an LCDR2, and an LCDR3 having an amino acid sequence of SEQ ID NOs:963, 964, and 965, respectively. In some specific embodiments, provided herein is an antibody that binds to IL-23R, comprising: (i) a VH comprising an HCDR1, an HCDR2, and an HCDR3 having an amino acid sequence of SEQ ID NOs:966, 967, and 968, respectively, and (ii) an VL comprising an LCDR1, an LCDR2, and an LCDR3 having an amino acid sequence of SEQ ID NOs:969, 970, and 971, respectively. In some specific embodiments, provided herein is an antibody that binds to IL-23R, comprising: (i) a VH comprising an HCDR1, an HCDR2, and an HCDR3 having an amino acid sequence of SEQ ID NOs:972, 973, and 974, respectively, and (ii) an VL comprising an LCDR1, an LCDR2, and an LCDR3 having an amino acid sequence of SEQ ID NOs:975, 976, and 977, respectively. In some specific embodiments, provided herein is an antibody that binds to IL-23R, comprising: (i) a VH comprising an HCDR1, an HCDR2, and an HCDR3 having an amino acid sequence of SEQ ID NOs:978, 979, and 980, respectively, and (ii) an VL comprising an LCDR1, an LCDR2, and an LCDR3 having an amino acid sequence of SEQ ID NOs:981, 982, and 983, respectively. In some specific embodiments, provided herein is an antibody that binds to IL-23R, comprising: (i) a VH comprising an HCDR1, an HCDR2, and an HCDR3 having an amino acid sequence of SEQ ID NOs:984, 985, and 986, respectively, and (ii) an VL comprising an LCDR1, an LCDR2, and an LCDR3 having an amino acid sequence of SEQ ID NOs:987, 988, and 989, respectively. In some specific embodiments, provided herein is an antibody that binds to IL-23R, comprising: (i) a VH comprising an HCDR1, an HCDR2, and an HCDR3 having an amino acid sequence of SEQ ID NOs:990, 991, and 992, respectively, and (ii) an VL comprising an LCDR1, an LCDR2, and an LCDR3 having an amino acid sequence of SEQ ID NOs:993, 994, and 995, respectively. In some specific embodiments, provided herein is an antibody that binds to IL-23R, comprising: (i) a VH comprising an HCDR1, an HCDR2, and an HCDR3 having an amino acid sequence of SEQ ID NOs:996, 997, and 998, respectively, and (ii) an VL comprising an LCDR1, an LCDR2, and an LCDR3 having an amino acid sequence of SEQ ID NOs:999, 1000, and 1001, respectively. In some specific embodiments, provided herein is an antibody that binds to IL-23R, comprising: (i) a VH comprising an HCDR1, an HCDR2, and an HCDR3 having an amino acid sequence of SEQ ID NOs:1002, 1003, and 1004, respectively, and (ii) an VL comprising an LCDR1, an LCDR2, and an LCDR3 having an amino acid sequence of SEQ ID NOs:1005, 1006, and 1007, respectively. In some specific embodiments, provided herein is an antibody that binds to IL-23R, comprising: (i) a VH comprising an HCDR1, an HCDR2, and an HCDR3 having an amino acid sequence of SEQ ID NOs:1008, 1009, and 1010, respectively, and (ii) an VL comprising an LCDR1, an LCDR2, and an LCDR3 having an amino acid sequence of SEQ ID NOs:1011, 1012, and 1013, respectively. In some specific embodiments, provided herein is an antibody that binds to IL-23R, comprising: (i) a VH comprising an HCDR1, an HCDR2, and an HCDR3 having an amino acid sequence of SEQ ID NOs:1014, 1015, and 1016, respectively, and (ii) an VL comprising an LCDR1, an LCDR2, and an LCDR3 having an amino acid sequence of SEQ ID NOs:1017, 1018, and 1019, respectively. In some specific embodiments, provided herein is an antibody that binds to IL-23R, comprising: (i) a VH comprising an HCDR1, an HCDR2, and an HCDR3 having an amino acid sequence of SEQ ID NOs:1020, 1021, and 1022, respectively, and (ii) an VL comprising an LCDR1, an LCDR2, and an LCDR3 having an amino acid sequence of SEQ ID NOs:1023, 1024, and 1025, respectively. In some specific embodiments, provided herein is an antibody that binds to IL-23R, comprising: (i) a VH comprising an HCDR1, an HCDR2, and an HCDR3 having an amino acid sequence of SEQ ID NOs:1026, 1027, and 1028, respectively, and (ii) an VL comprising an LCDR1, an LCDR2, and an LCDR3 having an amino acid sequence of SEQ ID NOs:1029, 1030, and 1031, respectively. In some specific embodiments, provided herein is an antibody that binds to IL-23R, comprising: (i) a VH comprising an HCDR1, an HCDR2, and an HCDR3 having an amino acid sequence of SEQ ID NOs:1032, 1033, and 1034, respectively, and (ii) an VL comprising an LCDR1, an LCDR2, and an LCDR3 having an amino acid sequence of SEQ ID NOs:1035, 1036, and 1037, respectively. In some specific embodiments, provided herein is an antibody that binds to IL-23R, comprising: (i) a VH comprising an HCDR1, an HCDR2, and an HCDR3 having an amino acid sequence of SEQ ID NOs:1038, 1039, and 1040, respectively, and (ii) an VL comprising an LCDR1, an LCDR2, and an LCDR3 having an amino acid sequence of SEQ ID NOs:1041, 1042, and 1043, respectively. In some specific embodiments, provided herein is an antibody that binds to IL-23R, comprising: (i) a VH comprising an HCDR1, an HCDR2, and an HCDR3 having an amino acid sequence of SEQ ID NOs:1050, 1051, and 1052, respectively, and (ii) an VL comprising an LCDR1, an LCDR2, and an LCDR3 having an amino acid sequence of SEQ ID NOs:1053, 1054, and 1055, respectively. In some specific embodiments, provided herein is an antibody that binds to IL-23R, comprising: (i) a VH comprising an HCDR1, an HCDR2, and an HCDR3 having an amino acid sequence of SEQ ID NOs:1056, 1057, and 1058, respectively, and (ii) an VL comprising an LCDR1, an LCDR2, and an LCDR3 having an amino acid sequence of SEQ ID NOs:1059, 1060, and 1061, respectively. In some specific embodiments, provided herein is an antibody that binds to IL-23R, comprising: (i) a VH comprising an HCDR1, an HCDR2, and an HCDR3 having an amino acid sequence of SEQ ID NOs:1062, 1063, and 1064, respectively, and (ii) an VL comprising an LCDR1, an LCDR2, and an LCDR3 having an amino acid sequence of SEQ ID NOs:1065, 1066, and 1067, respectively. In some specific embodiments, provided herein is an antibody that binds to IL-23R, comprising: (i) a VH comprising an HCDR1, an HCDR2, and an HCDR3 having an amino acid sequence of SEQ ID NOs:1068, 1069, and 1070, respectively, and (ii) an VL comprising an LCDR1, an LCDR2, and an LCDR3 having an amino acid sequence of SEQ ID NOs:1071, 1072, and 1073, respectively. In some specific embodiments, provided herein is an antibody that binds to IL-23R, comprising: (i) a VH comprising an HCDR1, an HCDR2, and an HCDR3 having an amino acid sequence of SEQ ID NOs:1080, 1081, and 1082, respectively, and (ii) a VL comprising an LCDR1, an LCDR2, and an LCDR3 having an amino acid sequence of SEQ ID NOs:1083, 1084, and 1085, respectively. In some specific embodiments, provided herein is an antibody that binds to IL-23R, comprising: (i) a VH comprising an HCDR1, an HCDR2, and an HCDR3 having an amino acid sequence of SEQ ID NOs:1086, 1087, and 1088, respectively, and (ii) an VL comprising an LCDR1, an LCDR2, and an LCDR3 having an amino acid sequence of SEQ ID NOs:1089, 1090, and 1091, respectively. In some specific embodiments, provided herein is an antibody that binds to IL-23R, comprising: (i) a VH comprising an HCDR1, an HCDR2, and an HCDR3 having an amino acid sequence of SEQ ID NOs:1092, 1093, and 1094, respectively, and (ii) an VL comprising an LCDR1, an LCDR2, and an LCDR3 having an amino acid sequence of SEQ ID NOs:1095, 1096, and 1097, respectively. In some specific embodiments, provided herein is an antibody that binds to IL-23R, comprising: (i) a VH comprising an HCDR1, an HCDR2, and an HCDR3 having an amino acid sequence of SEQ ID NOs:1098, 1099, and 1100, respectively, and (ii) an VL comprising an LCDR1, an LCDR2, and an LCDR3 having an amino acid sequence of SEQ ID NOs:1101, 1102, and 1103, respectively. In some specific embodiments, provided herein is an antibody that binds to IL-23R, comprising: (i) a VH comprising an HCDR1, an HCDR2, and an HCDR3 having an amino acid sequence of SEQ ID NOs:1104, 1105, and 1106, respectively, and (ii) an VL comprising an LCDR1, an LCDR2, and an LCDR3 having an amino acid sequence of SEQ ID NOs:1107, 1108, and 1109, respectively. In some specific embodiments, provided herein is an antibody that binds to IL-23R, comprising: (i) a VH comprising an HCDR1, an HCDR2, and an HCDR3 having an amino acid sequence of SEQ ID NOs:1110, 1111, and 1112, respectively, and (ii) an VL comprising an LCDR1, an LCDR2, and an LCDR3 having an amino acid sequence of SEQ ID NOs:1113, 1114, and 1115, respectively. In some specific embodiments, provided herein is an antibody that binds to IL-23R, comprising: (i) a VH comprising an HCDR1, an HCDR2, and an HCDR3 having an amino acid sequence of SEQ ID NOs:1116, 1117, and 1118, respectively, and (ii) an VL comprising an LCDR1, an LCDR2, and an LCDR3 having an amino acid sequence of SEQ ID NOs:1119, 1120, and 1121, respectively. In some specific embodiments, provided herein is an antibody that binds to IL-23R, comprising: (i) a VH comprising an HCDR1, an HCDR2, and an HCDR3 having an amino acid sequence of SEQ ID NOs:1122, 1123, and 1124, respectively, and (ii) an VL comprising an LCDR1, an LCDR2, and an LCDR3 having an amino acid sequence of SEQ ID NOs:1125, 1126, and 1127, respectively. In some specific embodiments, provided herein is an antibody that binds to IL-23R, comprising: (i) a VH comprising an HCDR1, an HCDR2, and an HCDR3 having an amino acid sequence of SEQ ID NOs:1128, 1129, and 1130, respectively, and (ii) an VL comprising an LCDR1, an LCDR2, and an LCDR3 having an amino acid sequence of SEQ ID NOs:1131, 1132, and 1133, respectively. In some specific embodiments, provided herein is an antibody that binds to IL-23R, comprising: (i) a VH comprising an HCDR1, an HCDR2, and an HCDR3 having an amino acid sequence of SEQ ID NOs:1134, 1135, and 1136, respectively, and (ii) a VL comprising an LCDR1, an LCDR2, and an LCDR3 having an amino acid sequence of SEQ ID NOs:1137, 1138, and 1139, respectively. In some specific embodiments, provided herein is an antibody that binds to IL-23R, comprising: (i) a VH comprising an HCDR1, an HCDR2, and an HCDR3 having an amino acid sequence of SEQ ID NOs:1140, 1141, and 1142, respectively, and (ii) a VL comprising an LCDR1, an LCDR2, and an LCDR3 having an amino acid sequence of SEQ ID NOs:1143, 1144, and 1145, respectively. In some specific embodiments, provided herein is an antibody that binds to IL-23R, comprising: (i) a VH comprising an HCDR1, an HCDR2, and an HCDR3 having an amino acid sequence of SEQ ID NOs:1146, 1147, and 1148, respectively, and (ii) an VL comprising an LCDR1, an LCDR2, and an LCDR3 having an amino acid sequence of SEQ ID NOs:1149, 1150, and 1151, respectively. In some specific embodiments, provided herein is an antibody that binds to IL-23R, comprising: (i) a VH comprising an HCDR1, an HCDR2, and an HCDR3 having an amino acid sequence of SEQ ID NOs:1152, 1153, and 1154, respectively, and (ii) an VL comprising an LCDR1, an LCDR2, and an LCDR3 having an amino acid sequence of SEQ ID NOs:1155, 1156, and 1157, respectively. In some specific embodiments, provided herein is an antibody that binds to IL-23R, comprising: (i) a VH comprising an HCDR1, an HCDR2, and an HCDR3 having an amino acid sequence of SEQ ID NOs:1158, 1159, and 1160, respectively, and (ii) an VL comprising an LCDR1, an LCDR2, and an LCDR3 having an amino acid sequence of SEQ ID NOs:1161, 1162, and 1163, respectively. In some specific embodiments, provided herein is an antibody that binds to IL-23R, comprising: (i) a VH comprising an HCDR1, an HCDR2, and an HCDR3 having an amino acid sequence of SEQ ID NOs:1164, 1165, and 1166, respectively, and (ii) an VL comprising an LCDR1, an LCDR2, and an LCDR3 having an amino acid sequence of SEQ ID NOs:1167, 1168, and 1169, respectively. In some specific embodiments, provided herein is an antibody that binds to IL-23R, comprising: (i) a VH comprising an HCDR1, an HCDR2, and an HCDR3 having an amino acid sequence of SEQ ID NOs:1170, 1171, and 1172, respectively, and (ii) an VL comprising an LCDR1, an LCDR2, and an LCDR3 having an amino acid sequence of SEQ ID NOs:1173, 1174, and 1175, respectively. In some specific embodiments, provided herein is an antibody that binds to IL-23R, comprising: (i) a VH comprising an HCDR1, an HCDR2, and an HCDR3 having an amino acid sequence of SEQ ID NOs:1176, 1177, and 1178, respectively, and (ii) an VL comprising an LCDR1, an LCDR2, and an LCDR3 having an amino acid sequence of SEQ ID NOs:1179, 1180, and 1181, respectively. In some specific embodiments, provided herein is an antibody that binds to IL-23R, comprising: (i) a VH comprising an HCDR1, an HCDR2, and an HCDR3 having an amino acid sequence of SEQ ID NOs:1182, 1183, and 1184, respectively, and (ii) an VL comprising an LCDR1, an LCDR2, and an LCDR3 having an amino acid sequence of SEQ ID NOs:1185, 1186, and 1187, respectively. In some specific embodiments, provided herein is an antibody that binds to IL-23R, comprising: (i) a VH comprising an HCDR1, an HCDR2, and an HCDR3 having an amino acid sequence of SEQ ID NOs:1188, 1189, and 1190, respectively, and (ii) an VL comprising an LCDR1, an LCDR2, and an LCDR3 having an amino acid sequence of SEQ ID NOs:1191, 1192, and 1193, respectively. In some specific embodiments, provided herein is an antibody that binds to IL-23R, comprising: (i) a VH comprising an HCDR1, an HCDR2, and an HCDR3 having an amino acid sequence of SEQ ID NOs:1194, 1195, and 1196, respectively, and (ii) an VL comprising an LCDR1, an LCDR2, and an LCDR3 having an amino acid sequence of SEQ ID NOs:1197, 1198, and 1199, respectively. In some specific embodiments, provided herein is an antibody that binds to IL-23R, comprising: (i) a VH comprising an HCDR1, an HCDR2, and an HCDR3 having an amino acid sequence of SEQ ID NOs:1200, 1201, and 1202, respectively, and (ii) an VL comprising an LCDR1, an LCDR2, and an LCDR3 having an amino acid sequence of SEQ ID NOs:1203, 1204, and 1205, respectively. In some specific embodiments, provided herein is an antibody that binds to IL-23R, comprising: (i) a VH comprising an HCDR1, an HCDR2, and an HCDR3 having an amino acid sequence of SEQ ID NOs:1206, 1207, and 1208, respectively, and (ii) an VL comprising an LCDR1, an LCDR2, and an LCDR3 having an amino acid sequence of SEQ ID NOs:1209, 1210, and 1211, respectively. In some specific embodiments, provided herein is an antibody that binds to IL-23R, comprising: (i) a VH comprising an HCDR1, an HCDR2, and an HCDR3 having an amino acid sequence of SEQ ID NOs:1212, 1213, and 1214, respectively, and (ii) an VL comprising an LCDR1, an LCDR2, and an LCDR3 having an amino acid sequence of SEQ ID NOs:1215, 1216, and 1217, respectively.

[0699] In some embodiments, the antibody further comprises one or more framework regions of SEQ ID NOs:136-269, 786-899. In some embodiments, the antibody provided herein is a humanized antibody. In some embodiments, the antibody is a chimeric antibody. Framework regions described herein are determined based upon the boundaries of the CDR numbering system. In other words, if the CDRs are determined by, e.g., Kabat, IMGT, or Chothia, then the framework regions are the amino acid residues surrounding the CDRs in the variable region in the format, from the N-terminus to C-terminus: FR1-CDR1-FR2-CDR2-FR3-CDR3-FR4. For example, FR1 is defined as the amino acid residues N-terminal to the CDR1 amino acid residues as defined by, e.g., the Kabat numbering system, the IMGT numbering system, or the Chothia numbering system, FR2 is defined as the amino acid residues between CDR1 and CDR2 amino acid residues as defined by, e.g., the Kabat numbering system, the IMGT numbering system, or the Chothia numbering system, FR3 is defined as the amino acid residues between CDR2 and CDR3 amino acid residues as defined by, e.g., the Kabat numbering system, the IMGT numbering system, or the Chothia numbering system, and FR4 is defined as the amino acid residues C-terminal to the CDR3 amino acid residues as defined by, e.g., the Kabat numbering system, the IMGT numbering system, or the Chothia numbering system.

[0700] In some embodiments, the antibody or antigen binding fragment provided herein comprises a VH comprising the amino acid sequence of SEQ ID NO:138, and a VL comprising the amino acid sequence of SEQ ID NO:139. In some embodiments, the antibody or antigen binding fragment provided herein comprises a VH comprising the amino acid sequence of SEQ ID NO:142, and a VL comprising the amino acid sequence of SEQ ID NO:143. In some embodiments, the antibody or antigen binding fragment provided herein comprises a VH comprising the amino acid sequence of SEQ ID NO:144, and a VL comprising the amino acid sequence of SEQ ID NO: 145. In some embodiments, the antibody or antigen binding fragment provided herein comprises a VH comprising the amino acid sequence of SEQ ID NO:148, and a VL comprising the amino acid sequence of SEQ ID NO: 149. In some embodiments, the antibody or antigen binding fragment provided herein comprises a VH comprising the amino acid sequence of SEQ ID NO:150, and a VL comprising the amino acid sequence of SEQ ID NO:151. In some embodiments, the antibody or antigen binding fragment provided herein comprises a VH comprising the amino acid sequence of SEQ ID NO:152, and a VL comprising the amino acid sequence of SEQ ID NO:153. In some embodiments, the antibody or antigen binding fragment provided herein comprises a VH comprising the amino acid sequence of SEQ ID NO:154, and a VL comprising the amino acid sequence of SEQ ID NO:155. In some embodiments, the antibody or antigen binding fragment provided herein comprises a VH comprising the amino acid sequence of SEQ ID NO:156, and a VL comprising the amino acid sequence of SEQ ID NO:157. In some embodiments, the antibody or antigen binding fragment provided herein comprises a VH comprising the amino acid sequence of SEQ ID NO:158, and a VL comprising the amino acid sequence of SEQ ID NO:159. In some embodiments, the antibody or antigen binding fragment provided herein comprises a VH comprising the amino acid sequence of SEQ ID NO:160, and a VL comprising the amino acid sequence of SEQ ID NO:161. In some embodiments, the antibody or antigen binding fragment provided herein comprises a VH comprising the amino acid sequence of SEQ ID NO:162, and a VL comprising the amino acid sequence of SEQ ID NO: 163. In some embodiments, the antibody or antigen binding fragment provided herein comprises a VH comprising the amino acid sequence of SEQ ID NO:164, and a VL comprising the amino acid sequence of SEQ ID NO: 165. In some embodiments, the antibody or antigen binding fragment provided herein comprises a VH comprising the amino acid sequence of SEQ ID NO:166, and a VL comprising the amino acid sequence of SEQ ID NO: 167. In some embodiments, the antibody or antigen binding fragment provided herein comprises a VH comprising the amino acid sequence of SEQ ID NO:168, and a VL comprising the amino acid sequence of SEQ ID NO:169. In some embodiments, the antibody or antigen binding fragment provided herein comprises a VH comprising the amino acid sequence of SEQ ID NO:170, and a VL comprising the amino acid sequence of SEQ ID NO:171. In some embodiments, the antibody or antigen binding fragment provided herein comprises a VH comprising the amino acid sequence of SEQ ID NO:172, and a VL comprising the amino acid sequence of SEQ ID NO:173. In some embodiments, the antibody or antigen binding fragment provided herein comprises a VH comprising the amino acid sequence of SEQ ID NO:174, and a VL comprising the amino acid sequence of SEQ ID NO:175. In some embodiments, the antibody or antigen binding fragment provided herein comprises a VH comprising the amino acid sequence of SEQ ID NO:176, and a VL comprising the amino acid sequence of SEQ ID NO: 177. In some embodiments, the antibody or antigen binding fragment provided herein comprises a VH comprising the amino acid sequence of SEQ ID NO:178, and a VL comprising the amino acid sequence of SEQ ID NO:179. In some embodiments, the antibody or antigen binding fragment provided herein comprises a VH comprising the amino acid sequence of SEQ ID NO:180, and a VL comprising the amino acid sequence of SEQ ID NO:181. In some embodiments, the antibody or antigen binding fragment provided herein comprises a VH comprising the amino acid sequence of SEQ ID NO:182, and a VL comprising the amino acid sequence of SEQ ID NO:183. In some embodiments, the antibody or antigen binding fragment provided herein comprises a VH comprising the amino acid sequence of SEQ ID NO:186, and a VL comprising the amino acid sequence of SEQ ID NO:187. In some embodiments, the antibody or antigen binding fragment provided herein comprises a VH comprising the amino acid sequence of SEQ ID NO:188, and a VL comprising the amino acid sequence of SEQ ID NO:189. In some embodiments, the antibody or antigen binding fragment provided herein comprises a VH comprising the amino acid sequence of SEQ ID NO:190, and a VL comprising the amino acid sequence of SEQ ID NO:191. In some embodiments, the antibody or antigen binding fragment provided herein comprises a VH comprising the amino acid sequence of SEQ ID NO:192, and a VL comprising the amino acid sequence of SEQ ID NO:193. In some embodiments, the antibody or antigen binding fragment provided herein comprises a VH comprising the amino acid sequence of SEQ ID NO:194, and a VL comprising the amino acid sequence of SEQ ID NO: 195. In some embodiments, the antibody or antigen binding fragment provided herein comprises a VH comprising the amino acid sequence of SEQ ID NO:196, and a VL comprising the amino acid sequence of SEQ ID NO: 197. In some embodiments, the antibody or antigen binding fragment provided herein comprises a VH comprising the amino acid sequence of SEQ ID NO:198, and a VL comprising the amino acid sequence of SEQ ID NO:199. In some embodiments, the antibody or antigen binding fragment provided herein comprises a VH comprising the amino acid sequence of SEQ ID NO:200, and a VL comprising the amino acid sequence of SEQ ID NO:201. In some embodiments, the antibody or antigen binding fragment provided herein comprises a VH comprising the amino acid sequence of SEQ ID NO:202, and a VL comprising the amino acid sequence of SEQ ID NO:203. In some embodiments, the antibody or antigen binding fragment provided herein comprises a VH comprising the amino acid sequence of SEQ ID NO:204, and a VL comprising the amino acid sequence of SEQ ID NO:205. In some embodiments, the antibody or antigen binding fragment provided herein comprises a VH comprising the amino acid sequence of SEQ ID NO:206, and a VL comprising the amino acid sequence of SEQ ID NO:207. In some embodiments, the antibody or antigen binding fragment provided herein comprises a VH comprising the amino acid sequence of SEQ ID NO:208, and a VL comprising the amino acid sequence of SEQ ID NO:209. In some embodiments, the antibody or antigen binding fragment provided herein comprises a VH comprising the amino acid sequence of SEQ ID NO:210, and a VL comprising the amino acid sequence of SEQ ID NO:211. In some embodiments, the antibody or antigen binding fragment provided herein comprises a VH comprising the amino acid sequence of SEQ ID NO:212, and a VL comprising the amino acid sequence of SEQ ID NO:213. In some embodiments, the antibody or antigen binding fragment provided herein comprises a VH comprising the amino acid sequence of SEQ ID NO:214, and a VL comprising the amino acid sequence of SEQ ID NO:215. In some embodiments, the antibody or antigen binding fragment provided herein comprises a VH comprising the amino acid sequence of SEQ ID NO:216, and a VL comprising the amino acid sequence of SEQ ID NO:217. In some embodiments, the antibody or antigen binding fragment provided herein comprises a VH comprising the amino acid sequence of SEQ ID NO:218, and a VL comprising the amino acid sequence of SEQ ID NO:219. In some embodiments, the antibody or antigen binding fragment provided herein comprises a VH comprising the amino acid sequence of SEQ ID NO:220, and a VL comprising the amino acid sequence of SEQ ID NO:221. In some embodiments, the antibody or antigen binding fragment provided herein comprises a VH comprising the amino acid sequence of SEQ ID NO:222, and a VL comprising the amino acid sequence of SEQ ID NO:223. In some embodiments, the antibody or antigen binding fragment provided herein comprises a VH comprising the amino acid sequence of SEQ ID NO:226, and a VL comprising the amino acid sequence of SEQ ID NO:227. In some embodiments, the antibody or antigen binding fragment provided herein comprises a VH comprising the amino acid sequence of SEQ ID NO:228, and a VL comprising the amino acid sequence of SEQ ID NO:229. In some embodiments, the antibody or antigen binding fragment provided herein comprises a VH comprising the amino acid sequence of SEQ ID NO:230, and a VL comprising the amino acid sequence of SEQ ID NO:231. In some embodiments, the antibody or antigen binding fragment provided herein comprises a VH comprising the amino acid sequence of SEQ ID NO:232, and a VL comprising the amino acid sequence of SEQ ID NO:233. In some embodiments, the antibody or antigen binding fragment provided herein comprises a VH comprising the amino acid sequence of SEQ ID NO:234, and a VL comprising the amino acid sequence of SEQ ID NO:235. In some embodiments, the antibody or antigen binding fragment provided herein comprises a VH comprising the amino acid sequence of SEQ ID NO:236, and a VL comprising the amino acid sequence of SEQ ID NO:237. In some embodiments, the antibody or antigen binding fragment provided herein comprises a VH comprising the amino acid sequence of SEQ ID NO:238, and a VL comprising the amino acid sequence of SEQ ID NO:239. In some embodiments, the antibody or antigen binding fragment provided herein comprises a VH comprising the amino acid sequence of SEQ ID NO:240, and a VL comprising the amino acid sequence of SEQ ID NO:241. In some embodiments, the antibody or antigen binding fragment provided herein comprises a VH comprising the amino acid sequence of SEQ ID NO:246, and a VL comprising the amino acid sequence of SEQ ID NO:247. In some embodiments, the antibody or antigen binding fragment provided herein comprises a VH comprising the amino acid sequence of SEQ ID NO:248, and a VL comprising the amino acid sequence of SEQ ID NO:249. In some embodiments, the antibody or antigen binding fragment provided herein comprises a VH comprising the amino acid sequence of SEQ ID NO:250, and a VL comprising the amino acid sequence of SEQ ID NO:251. In some embodiments, the antibody or antigen binding fragment provided herein comprises a VH comprising the amino acid sequence of SEQ ID NO:252, and a VL comprising the amino acid sequence of SEQ ID NO:253. In some embodiments, the antibody or antigen binding fragment provided herein comprises a VH comprising the amino acid sequence of SEQ ID NO:254, and a VL comprising the amino acid sequence of SEQ ID NO:255. In some embodiments, the antibody or antigen binding fragment provided herein comprises a VH comprising the amino acid sequence of SEQ ID NO:256, and a VL comprising the amino acid sequence of SEQ ID NO:257. In some embodiments, the antibody or antigen binding fragment provided herein comprises a VH comprising the amino acid sequence of SEQ ID NO:258, and a VL comprising the amino acid sequence of SEQ ID NO:259. In some embodiments, the antibody or antigen binding fragment provided herein comprises a VH comprising the amino acid sequence of SEQ ID NO:260, and a VL comprising the amino acid sequence of SEQ ID NO:261. In some embodiments, the antibody or antigen binding fragment provided herein comprises a VH comprising the amino acid sequence of SEQ ID NO:262, and a LCDR1, an LCDR2, and an LCDR3 as set forth in SEQ ID NO:263. In some embodiments, the antibody or antigen binding fragment provided herein comprises a VH comprising the amino acid sequence of SEQ ID NO:264, and a VL comprising the amino acid sequence of SEQ ID NO:265. In some embodiments, the antibody or antigen binding fragment provided herein comprises a VH comprising the amino acid sequence of SEQ ID NO:268, and a VL comprising the amino acid sequence of SEQ ID NO:269. In some embodiments, the antibody or antigen binding fragment provided herein comprises a VH comprising the amino acid sequence of SEQ ID NO:786, and a VL comprising the amino acid sequence of SEQ ID NO:787. In some embodiments, the antibody or antigen binding fragment provided herein comprises a VH comprising the amino acid sequence of SEQ ID NO:788, and a VL comprising the amino acid sequence of SEQ ID NO:789. In some embodiments, the antibody or antigen binding fragment provided herein comprises a VH comprising the amino acid sequence of SEQ ID NO:790, and a VL comprising the amino acid sequence of SEQ ID NO:791. In some embodiments, the antibody or antigen binding fragment provided herein comprises a VH comprising the amino acid sequence of SEQ ID NO:792, and a VL comprising the amino acid sequence of SEQ ID NO:793. In some embodiments, the antibody or antigen binding fragment provided herein comprises a VH comprising the amino acid sequence of SEQ ID NO:798, and a VL comprising the amino acid sequence of SEQ ID NO:799. In some embodiments, the antibody or antigen binding fragment provided herein comprises a VH comprising the amino acid sequence of SEQ ID NO:806, and a VL comprising the amino acid sequence of SEQ ID NO:807. In some embodiments, the antibody or antigen binding fragment provided herein comprises a VH comprising the amino acid sequence of SEQ ID NO:808, and a VL comprising the amino acid sequence of SEQ ID NO:809. In some embodiments, the antibody or antigen binding fragment provided herein comprises a VH comprising the amino acid sequence of SEQ ID NO:810, and a VL comprising the amino acid sequence of SEQ ID NO:811. In some embodiments, the antibody or antigen binding fragment provided herein comprises a VH comprising the amino acid sequence of SEQ ID NO:812, and a VL comprising the amino acid sequence of SEQ ID NO:813. In some embodiments, the antibody or antigen binding fragment provided herein comprises a VH comprising the amino acid sequence of SEQ ID NO:814, and a VL comprising the amino acid sequence of SEQ ID NO:815. In some embodiments, the antibody or antigen binding fragment provided herein comprises a VH comprising the amino acid sequence of SEQ ID NO:816, and a VL comprising the amino acid sequence of SEQ ID NO:817. In some embodiments, the antibody or antigen binding fragment provided herein comprises a VH comprising the amino acid sequence of SEQ ID NO:818, and a VL comprising the amino acid sequence of SEQ ID NO:819. In some embodiments, the antibody or antigen binding fragment provided herein comprises a VH comprising the amino acid sequence of SEQ ID NO:820, and a VL comprising the amino acid sequence of SEQ ID NO:821. In some embodiments, the antibody or antigen binding fragment provided herein comprises a VH comprising the amino acid sequence of SEQ ID NO:822, and a VL comprising the amino acid sequence of SEQ ID NO:823. In some embodiments, the antibody or antigen binding fragment provided herein comprises a VH comprising the amino acid sequence of SEQ ID NO:824, and a VL comprising the amino acid sequence of SEQ ID NO:825. In some embodiments, the antibody or antigen binding fragment provided herein comprises a VH comprising the amino acid sequence of SEQ ID NO:826, and a VL comprising the amino acid sequence of SEQ ID NO:827. In some embodiments, the antibody or antigen binding fragment provided herein comprises a VH comprising the amino acid sequence of SEQ ID NO:828, and a VL comprising the amino acid sequence of SEQ ID NO:829. In some embodiments, the antibody or antigen binding fragment provided herein comprises a VH comprising the amino acid sequence of SEQ ID NO:830, and a VL comprising the amino acid sequence of SEQ ID NO:831. In some embodiments, the antibody or antigen binding fragment provided herein comprises a VH comprising the amino acid sequence of SEQ ID NO:832, and a VL comprising the amino acid sequence of SEQ ID NO:833. In some embodiments, the antibody or antigen binding fragment provided herein comprises a VH comprising the amino acid sequence of SEQ ID NO:836, and a VL comprising the amino acid sequence of SEQ ID NO:837. In some embodiments, the antibody or antigen binding fragment provided herein comprises a VH comprising the amino acid sequence of SEQ ID NO:838, and a VL comprising the amino acid sequence of SEQ ID NO:839. In some embodiments, the antibody or antigen binding fragment provided herein comprises a VH comprising the amino acid sequence of SEQ ID NO:840, and a VL comprising the amino acid sequence of SEQ ID NO:841. In some embodiments, the antibody or antigen binding fragment provided herein comprises a VH comprising the amino acid sequence of SEQ ID NO: 842, and a VL comprising the amino acid sequence of SEQ ID NO:843. In some embodiments, the antibody or antigen binding fragment provided herein comprises a VH comprising the amino acid sequence of SEQ ID NO:846, and a VL comprising the amino acid sequence of SEQ ID NO:847. In some embodiments, the antibody or antigen binding fragment provided herein comprises a VH comprising the amino acid sequence of SEQ ID NO:848, and a VL comprising the amino acid sequence of SEQ ID NO:849. In some embodiments, the antibody or antigen binding fragment provided herein comprises a VH comprising the amino acid sequence of SEQ ID NO:850, and a VL comprising the amino acid sequence of SEQ ID NO:851. In some embodiments, the antibody or antigen binding fragment provided herein comprises a VH comprising the amino acid sequence of SEQ ID NO:852, and a VL comprising the amino acid sequence of SEQ ID NO:853. In some embodiments, the antibody or antigen binding fragment provided herein comprises a VH comprising the amino acid sequence of SEQ ID NO:854, and a VL comprising the amino acid sequence of SEQ ID NO:855. In some embodiments, the antibody or antigen binding fragment provided herein comprises a VH comprising the amino acid sequence of SEQ ID NO:856, and a VL comprising the amino acid sequence of SEQ ID NO:857. In some embodiments, the antibody or antigen binding fragment provided herein comprises a VH comprising the amino acid sequence of SEQ ID NO:858, and a VL comprising the amino acid sequence of SEQ ID NO:859. In some embodiments, the antibody or antigen binding fragment provided herein comprises a VH comprising the amino acid sequence of SEQ ID NO:860, and a VL comprising the amino acid sequence of SEQ ID NO:861. In some embodiments, the antibody or antigen binding fragment provided herein comprises a VH comprising the amino acid sequence of SEQ ID NO:862, and a VL comprising the amino acid sequence of SEQ ID NO:863. In some embodiments, the antibody or antigen binding fragment provided herein comprises a VH comprising the amino acid sequence of SEQ ID NO:864, and a VL comprising the amino acid sequence of SEQ ID NO:865. In some embodiments, the antibody or antigen binding fragment provided herein comprises a VH comprising the amino acid sequence of SEQ ID NO:866, and a VL comprising the amino acid sequence of SEQ ID NO:867. In some embodiments, the antibody or antigen binding fragment provided herein comprises a VH comprising the amino acid sequence of SEQ ID NO:868, and a VL comprising the amino acid sequence of SEQ ID NO:869. In some embodiments, the antibody or antigen binding fragment provided herein comprises a VH comprising the amino acid sequence of SEQ ID NO:870, and a VL comprising the amino acid sequence of SEQ ID NO:871. In some embodiments, the antibody or antigen binding fragment provided herein comprises a VH comprising the amino acid sequence of SEQ ID NO:872, and a VL comprising the amino acid sequence of SEQ ID NO:873. In some embodiments, the antibody or antigen binding fragment provided herein comprises a VH comprising the amino acid sequence of SEQ ID NO:874, and a VL comprising the amino acid sequence of SEQ ID NO:875. In some embodiments, the antibody or antigen binding fragment provided herein comprises a VH comprising the amino acid sequence of SEQ ID NO:876, and a VL comprising the amino acid sequence of SEQ ID NO:877. In some embodiments, the antibody or antigen binding fragment provided herein comprises a VH comprising the amino acid sequence of SEQ ID NO:878, and a VL comprising the amino acid sequence of SEQ ID NO:879. In some embodiments, the antibody or antigen binding fragment provided herein comprises a VH comprising the amino acid sequence of SEQ ID NO:880, and a VL comprising the amino acid sequence of SEQ ID NO:881. In some embodiments, the antibody or antigen binding fragment provided herein comprises a VH comprising the amino acid sequence of SEQ ID NO:882, and a VL comprising the amino acid sequence of SEQ ID NO:883. In some embodiments, the antibody or antigen binding fragment provided herein comprises a VH comprising the amino acid sequence of SEQ ID NO:884, and a VL comprising the amino acid sequence of SEQ ID NO:885. In some embodiments, the antibody or antigen binding fragment provided herein comprises a VH comprising the amino acid sequence of SEQ ID NO:886, and a VL comprising the amino acid sequence of SEQ ID NO:887. In some embodiments, the antibody or antigen binding fragment provided herein comprises a VH comprising the amino acid sequence of SEQ ID NO:888, and a VL comprising the amino acid sequence of SEQ ID NO:889. In some embodiments, the antibody or antigen binding fragment provided herein comprises a VH comprising the amino acid sequence of SEQ ID NO:890, and a VL comprising the amino acid sequence of SEQ ID NO:891.

[0701] In certain embodiments, an antibody described herein or an antigen binding fragment thereof comprises amino acid sequences with certain percent identity relative to any antibody provided herein, for example, those described in the Examples providedbelow, including as set out in Tables 4-9.

[0702] The determination of percent identity between two sequences (e.g., amino acid sequences or nucleic acid sequences) can be accomplished using a mathematical algorithm. A non-limiting example of a mathematical algorithm utilized for the comparison of two sequences is the algorithm of Karlin and Altschul, Proc. Natl. Acad. Sci. U.S.A. 87:2264 2268 (1990), modified as in Karlin and Altschul, Proc. Natl. Acad. Sci. U.S.A. 90:5873 5877 (1993). Such an algorithm is incorporated into the NBLAST and XBLAST programs of Altschul et al., J. Mol. Biol. 215:403 (1990). BLAST nucleotide searches can be performed with the NBLAST nucleotide program parameters set, e.g., for score=100, word length=12 to obtain nucleotide sequences homologous to a nucleic acid molecules described herein. BLAST protein searches can be performed with the XBLAST program parameters set, e.g., to score 50, word length=3 to obtain amino acid sequences homologous to a protein molecule described herein. To obtain gapped alignments for comparison purposes, Gapped BLAST can be utilized as described in Altschul et al., Nucleic Acids Res. 25:3389 3402 (1997). Alternatively, PSI BLAST can be used to perform an iterated search which detects distant relationships between molecules (Id.). When utilizing BLAST, Gapped BLAST, and PSI Blast programs, the default parameters of the respective programs (e.g., of XBLAST and NBLAST) can be used (see, e.g., National Center for Biotechnology Information (NCBI) on the worldwide web, ncbi.nlm.nih.gov). Another non-limiting example of a mathematical algorithm utilized for the comparison of sequences is the algorithm of Myers and Miller, CABIOS 4:11-17 (1998). Such an algorithm is incorporated in the ALIGN program (version 2.0) which is part of the GCG sequence alignment software package. When utilizing the ALIGN program for comparing amino acid sequences, a PAM120 weight residue table, a gap length penalty of 12, and a gap penalty of 4 can be used. The percent identity between two sequences can be determined using techniques similar to those described above, with or without allowing gaps. In calculating percent identity, typically only exact matches are counted.

[0703] In some embodiments, the antibody provided herein contains substitutions (e.g., conservative substitutions), insertions, or deletions relative to the reference sequence, but the anti-IL-23R antibody comprising that sequence retains the ability to bind to IL-23R. In some embodiments, the antibody provided herein contains substitutions (e.g., conservative substitutions), insertions, or deletions relative to the reference sequence, but the anti-IL-23R antibody comprising that sequence retains the ability to bind to IL-23R ECD. In some embodiments, a total of 1 to 10 amino acids have been substituted, inserted and/or deleted in a reference amino acid sequence. In some embodiments, a total of 1 to 10 amino acids have been substituted in a reference amino acid sequence. In some embodiments, substitutions, insertions, or deletions occur in regions outside the CDRs (i.e., in the FRs). In some embodiments, substitutions occur in regions outside the CDRs (i.e., in the FRs). In some embodiments, the anti-IL-23R antibody provided herein includes post-translational modifications of a reference sequence.

[0704] In some embodiments, the antibody or antigen binding fragment provided herein comprises a VH domain having at least 75%, at least 80%, at least 85%, at least 90%, at least 91%, at least 92%, at least 93%, at least 94%, at least 95%, at least 96%, at least 97%, at least 98%, or at least 99% sequence identity to the amino acid sequence of SEQ ID NO:138, and a VL domain having at least 75%, at least 80%, at least 85%, at least 90%, at least 91%, at least 92%, at least 93%, at least 94%, at least 95%, at least 96%, at least 97%, at least 98%, or at least 99% sequence identity to the amino acid sequence of SEQ ID NO:139. In some embodiments, the antibody or antigen binding fragment provided herein comprises a VH domain having at least 75%, at least 80%, at least 85%, at least 90%, at least 91%, at least 92%, at least 93%, at least 94%, at least 95%, at least 96%, at least 97%, at least 98%, or at least 99% sequence identity to the amino acid sequence of SEQ ID NO:142, and a VL domain having at least 75%, at least 80%, at least 85%, at least 90%, at least 91%, at least 92%, at least 93%, at least 94%, at least 95%, at least 96%, at least 97%, at least 98%, or at least 99% sequence identity to the amino acid sequence of SEQ ID NO:143. In some embodiments, the antibody or antigen binding fragment provided herein comprises a VH domain having at least 75%, at least 80%, at least 85%, at least 90%, at least 91%, at least 92%, at least 93%, at least 94%, at least 95%, at least 96%, at least 97%, at least 98%, or at least 99% sequence identity to the amino acid sequence of SEQ ID NO:144, and a VL domain having at least 75%, at least 80%, at least 85%, at least 90%, at least 91%, at least 92%, at least 93%, at least 94%, at least 95%, at least 96%, at least 97%, at least 98%, or at least 99% sequence identity to the amino acid sequence of SEQ ID NO:145. In some embodiments, the antibody or antigen binding fragment provided herein comprises a VH domain having at least 75%, at least 80%, at least 85%, at least 90%, at least 91%, at least 92%, at least 93%, at least 94%, at least 95%, at least 96%, at least 97%, at least 98%, or at least 99% sequence identity to the amino acid sequence of SEQ ID NO:148, and a VL domain having at least 75%, at least 80%, at least 85%, at least 90%, at least 91%, at least 92%, at least 93%, at least 94%, at least 95%, at least 96%, at least 97%, at least 98%, or at least 99% sequence identity to the amino acid sequence of SEQ ID NO:149. In some embodiments, the antibody or antigen binding fragment provided herein comprises a VH domain having at least 75%, at least 80%, at least 85%, at least 90%, at least 91%, at least 92%, at least 93%, at least 94%, at least 95%, at least 96%, at least 97%, at least 98%, or at least 99% sequence identity to the amino acid sequence of SEQ ID NO: 150, and a VL domain having at least 75%, at least 80%, at least 85%, at least 90%, at least 91%, at least 92%, at least 93%, at least 94%, at least 95%, at least 96%, at least 97%, at least 98%, or at least 99% sequence identity to the amino acid sequence of SEQ ID NO:151. In some embodiments, the antibody or antigen binding fragment provided herein comprises a VH domain having at least 75%, at least 80%, at least 85%, at least 90%, at least 91%, at least 92%, at least 93%, at least 94%, at least 95%, at least 96%, at least 97%, at least 98%, or at least 99% sequence identity to the amino acid sequence of SEQ ID NO:152, and a VL domain having at least 75%, at least 80%, at least 85%, at least 90%, at least 91%, at least 92%, at least 93%, at least 94%, at least 95%, at least 96%, at least 97%, at least 98%, or at least 99% sequence identity to the amino acid sequence of SEQ ID NO:153. In some embodiments, the antibody or antigen binding fragment provided herein comprises a VH domain having at least 75%, at least 80%, at least 85%, at least 90%, at least 91%, at least 92%, at least 93%, at least 94%, at least 95%, at least 96%, at least 97%, at least 98%, or at least 99% sequence identity to the amino acid sequence of SEQ ID NO:154, and a VL domain having at least 75%, at least 80%, at least 85%, at least 90%, at least 91%, at least 92%, at least 93%, at least 94%, at least 95%, at least 96%, at least 97%, at least 98%, or at least 99% sequence identity to the amino acid sequence of SEQ ID NO:155. In some embodiments, the antibody or antigen binding fragment provided herein comprises a VH domain having at least 75%, at least 80%, at least 85%, at least 90%, at least 91%, at least 92%, at least 93%, at least 94%, at least 95%, at least 96%, at least 97%, at least 98%, or at least 99% sequence identity to the amino acid sequence of SEQ ID NO: 156, and a VL domain having at least 75%, at least 80%, at least 85%, at least 90%, at least 91%, at least 92%, at least 93%, at least 94%, at least 95%, at least 96%, at least 97%, at least 98%, or at least 99% sequence identity to the amino acid sequence of SEQ ID NO:157. In some embodiments, the antibody or antigen binding fragment provided herein comprises a VH domain having at least 75%, at least 80%, at least 85%, at least 90%, at least 91%, at least 92%, at least 93%, at least 94%, at least 95%, at least 96%, at least 97%, at least 98%, or at least 99% sequence identity to the amino acid sequence of SEQ ID NO:158, and a VL domain having at least 75%, at least 80%, at least 85%, at least 90%, at least 91%, at least 92%, at least 93%, at least 94%, at least 95%, at least 96%, at least 97%, at least 98%, or at least 99% sequence identity to the amino acid sequence of SEQ ID NO:159. In some embodiments, the antibody or antigen binding fragment provided herein comprises a VH domain having at least 75%, at least 80%, at least 85%, at least 90%, at least 91%, at least 92%, at least 93%, at least 94%, at least 95%, at least 96%, at least 97%, at least 98%, or at least 99% sequence identity to the amino acid sequence of SEQ ID NO:160, and a VL domain having at least 75%, at least 80%, at least 85%, at least 90%, at least 91%, at least 92%, at least 93%, at least 94%, at least 95%, at least 96%, at least 97%, at least 98%, or at least 99% sequence identity to the amino acid sequence of SEQ ID NO:161. In some embodiments, the antibody or antigen binding fragment provided herein comprises a VH domain having at least 75%, at least 80%, at least 85%, at least 90%, at least 91%, at least 92%, at least 93%, at least 94%, at least 95%, at least 96%, at least 97%, at least 98%, or at least 99% sequence identity to the amino acid sequence of SEQ ID NO: 162, and a VL domain having at least 75%, at least 80%, at least 85%, at least 90%, at least 91%, at least 92%, at least 93%, at least 94%, at least 95%, at least 96%, at least 97%, at least 98%, or at least 99% sequence identity to the amino acid sequence of SEQ ID NO:163. In some embodiments, the antibody or antigen binding fragment provided herein comprises a VH domain having at least 75%, at least 80%, at least 85%, at least 90%, at least 91%, at least 92%, at least 93%, at least 94%, at least 95%, at least 96%, at least 97%, at least 98%, or at least 99% sequence identity to the amino acid sequence of SEQ ID NO:164, and a VL domain having at least 75%, at least 80%, at least 85%, at least 90%, at least 91%, at least 92%, at least 93%, at least 94%, at least 95%, at least 96%, at least 97%, at least 98%, or at least 99% sequence identity to the amino acid sequence of SEQ ID NO:165. In some embodiments, the antibody or antigen binding fragment provided herein comprises a VH domain having at least 75%, at least 80%, at least 85%, at least 90%, at least 91%, at least 92%, at least 93%, at least 94%, at least 95%, at least 96%, at least 97%, at least 98%, or at least 99% sequence identity to the amino acid sequence of SEQ ID NO:166, and a VL domain having at least 75%, at least 80%, at least 85%, at least 90%, at least 91%, at least 92%, at least 93%, at least 94%, at least 95%, at least 96%, at least 97%, at least 98%, or at least 99% sequence identity to the amino acid sequence of SEQ ID NO:167. In some embodiments, the antibody or antigen binding fragment provided herein comprises a VH domain having at least 75%, at least 80%, at least 85%, at least 90%, at least 91%, at least 92%, at least 93%, at least 94%, at least 95%, at least 96%, at least 97%, at least 98%, or at least 99% sequence identity to the amino acid sequence of SEQ ID NO: 168, and a VL domain having at least 75%, at least 80%, at least 85%, at least 90%, at least 91%, at least 92%, at least 93%, at least 94%, at least 95%, at least 96%, at least 97%, at least 98%, or at least 99% sequence identity to the amino acid sequence of SEQ ID NO:169. In some embodiments, the antibody or antigen binding fragment provided herein comprises a VH domain having at least 75%, at least 80%, at least 85%, at least 90%, at least 91%, at least 92%, at least 93%, at least 94%, at least 95%, at least 96%, at least 97%, at least 98%, or at least 99% sequence identity to the amino acid sequence of SEQ ID NO:170, and a VL domain having at least 75%, at least 80%, at least 85%, at least 90%, at least 91%, at least 92%, at least 93%, at least 94%, at least 95%, at least 96%, at least 97%, at least 98%, or at least 99% sequence identity to the amino acid sequence of SEQ ID NO:171. In some embodiments, the antibody or antigen binding fragment provided herein comprises a VH domain having at least 75%, at least 80%, at least 85%, at least 90%, at least 91%, at least 92%, at least 93%, at least 94%, at least 95%, at least 96%, at least 97%, at least 98%, or at least 99% sequence identity to the amino acid sequence of SEQ ID NO:172, and a VL domain having at least 75%, at least 80%, at least 85%, at least 90%, at least 91%, at least 92%, at least 93%, at least 94%, at least 95%, at least 96%, at least 97%, at least 98%, or at least 99% sequence identity to the amino acid sequence of SEQ ID NO:173. In some embodiments, the antibody or antigen binding fragment provided herein comprises a VH domain having at least 75%, at least 80%, at least 85%, at least 90%, at least 91%, at least 92%, at least 93%, at least 94%, at least 95%, at least 96%, at least 97%, at least 98%, or at least 99% sequence identity to the amino acid sequence of SEQ ID NO: 174, and a VL domain having at least 75%, at least 80%, at least 85%, at least 90%, at least 91%, at least 92%, at least 93%, at least 94%, at least 95%, at least 96%, at least 97%, at least 98%, or at least 99% sequence identity to the amino acid sequence of SEQ ID NO:175. In some embodiments, the antibody or antigen binding fragment provided herein comprises a VH domain having at least 75%, at least 80%, at least 85%, at least 90%, at least 91%, at least 92%, at least 93%, at least 94%, at least 95%, at least 96%, at least 97%, at least 98%, or at least 99% sequence identity to the amino acid sequence of SEQ ID NO:176, and a VL domain having at least 75%, at least 80%, at least 85%, at least 90%, at least 91%, at least 92%, at least 93%, at least 94%, at least 95%, at least 96%, at least 97%, at least 98%, or at least 99% sequence identity to the amino acid sequence of SEQ ID NO:177. In some embodiments, the antibody or antigen binding fragment provided herein comprises a VH domain having at least 75%, at least 80%, at least 85%, at least 90%, at least 91%, at least 92%, at least 93%, at least 94%, at least 95%, at least 96%, at least 97%, at least 98%, or at least 99% sequence identity to the amino acid sequence of SEQ ID NO:178, and a VL domain having at least 75%, at least 80%, at least 85%, at least 90%, at least 91%, at least 92%, at least 93%, at least 94%, at least 95%, at least 96%, at least 97%, at least 98%, or at least 99% sequence identity to the amino acid sequence of SEQ ID NO:179. In some embodiments, the antibody or antigen binding fragment provided herein comprises a VH domain having at least 75%, at least 80%, at least 85%, at least 90%, at least 91%, at least 92%, at least 93%, at least 94%, at least 95%, at least 96%, at least 97%, at least 98%, or at least 99% sequence identity to the amino acid sequence of SEQ ID NO: 180, and a VL domain having at least 75%, at least 80%, at least 85%, at least 90%, at least 91%, at least 92%, at least 93%, at least 94%, at least 95%, at least 96%, at least 97%, at least 98%, or at least 99% sequence identity to the amino acid sequence of SEQ ID NO:181. In some embodiments, the antibody or antigen binding fragment provided herein comprises a VH domain having at least 75%, at least 80%, at least 85%, at least 90%, at least 91%, at least 92%, at least 93%, at least 94%, at least 95%, at least 96%, at least 97%, at least 98%, or at least 99% sequence identity to the amino acid sequence of SEQ ID NO:182, and a VL domain having at least 75%, at least 80%, at least 85%, at least 90%, at least 91%, at least 92%, at least 93%, at least 94%, at least 95%, at least 96%, at least 97%, at least 98%, or at least 99% sequence identity to the amino acid sequence of SEQ ID NO:183. In some embodiments, the antibody or antigen binding fragment provided herein comprises a VH domain having at least 75%, at least 80%, at least 85%, at least 90%, at least 91%, at least 92%, at least 93%, at least 94%, at least 95%, at least 96%, at least 97%, at least 98%, or at least 99% sequence identity to the amino acid sequence of SEQ ID NO:186, and a VL domain having at least 75%, at least 80%, at least 85%, at least 90%, at least 91%, at least 92%, at least 93%, at least 94%, at least 95%, at least 96%, at least 97%, at least 98%, or at least 99% sequence identity to the amino acid sequence of SEQ ID NO:187. In some embodiments, the antibody or antigen binding fragment provided herein comprises a VH domain having at least 75%, at least 80%, at least 85%, at least 90%, at least 91%, at least 92%, at least 93%, at least 94%, at least 95%, at least 96%, at least 97%, at least 98%, or at least 99% sequence identity to the amino acid sequence of SEQ ID NO: 188, and a VL domain having at least 75%, at least 80%, at least 85%, at least 90%, at least 91%, at least 92%, at least 93%, at least 94%, at least 95%, at least 96%, at least 97%, at least 98%, or at least 99% sequence identity to the amino acid sequence of SEQ ID NO:189. In some embodiments, the antibody or antigen binding fragment provided herein comprises a VH domain having at least 75%, at least 80%, at least 85%, at least 90%, at least 91%, at least 92%, at least 93%, at least 94%, at least 95%, at least 96%, at least 97%, at least 98%, or at least 99% sequence identity to the amino acid sequence of SEQ ID NO:190, and a VL domain having at least 75%, at least 80%, at least 85%, at least 90%, at least 91%, at least 92%, at least 93%, at least 94%, at least 95%, at least 96%, at least 97%, at least 98%, or at least 99% sequence identity to the amino acid sequence of SEQ ID NO:191. In some embodiments, the antibody or antigen binding fragment provided herein comprises a VH domain having at least 75%, at least 80%, at least 85%, at least 90%, at least 91%, at least 92%, at least 93%, at least 94%, at least 95%, at least 96%, at least 97%, at least 98%, or at least 99% sequence identity to the amino acid sequence of SEQ ID NO:192, and a VL domain having at least 75%, at least 80%, at least 85%, at least 90%, at least 91%, at least 92%, at least 93%, at least 94%, at least 95%, at least 96%, at least 97%, at least 98%, or at least 99% sequence identity to the amino acid sequence of SEQ ID NO:193. In some embodiments, the antibody or antigen binding fragment provided herein comprises a VH domain having at least 75%, at least 80%, at least 85%, at least 90%, at least 91%, at least 92%, at least 93%, at least 94%, at least 95%, at least 96%, at least 97%, at least 98%, or at least 99% sequence identity to the amino acid sequence of SEQ ID NO: 194, and a VL domain having at least 75%, at least 80%, at least 85%, at least 90%, at least 91%, at least 92%, at least 93%, at least 94%, at least 95%, at least 96%, at least 97%, at least 98%, or at least 99% sequence identity to the amino acid sequence of SEQ ID NO:195. In some embodiments, the antibody or antigen binding fragment provided herein comprises a VH domain having at least 75%, at least 80%, at least 85%, at least 90%, at least 91%, at least 92%, at least 93%, at least 94%, at least 95%, at least 96%, at least 97%, at least 98%, or at least 99% sequence identity to the amino acid sequence of SEQ ID NO:196, and a VL domain having at least 75%, at least 80%, at least 85%, at least 90%, at least 91%, at least 92%, at least 93%, at least 94%, at least 95%, at least 96%, at least 97%, at least 98%, or at least 99% sequence identity to the amino acid sequence of SEQ ID NO:197. In some embodiments, the antibody or antigen binding fragment provided herein comprises a VH domain having at least 75%, at least 80%, at least 85%, at least 90%, at least 91%, at least 92%, at least 93%, at least 94%, at least 95%, at least 96%, at least 97%, at least 98%, or at least 99% sequence identity to the amino acid sequence of SEQ ID NO:198, and a VL domain having at least 75%, at least 80%, at least 85%, at least 90%, at least 91%, at least 92%, at least 93%, at least 94%, at least 95%, at least 96%, at least 97%, at least 98%, or at least 99% sequence identity to the amino acid sequence of SEQ ID NO:199. In some embodiments, the antibody or antigen binding fragment provided herein comprises a VH domain having at least 75%, at least 80%, at least 85%, at least 90%, at least 91%, at least 92%, at least 93%, at least 94%, at least 95%, at least 96%, at least 97%, at least 98%, or at least 99% sequence identity to the amino acid sequence of SEQ ID NO:200, and a VL domain having at least 75%, at least 80%, at least 85%, at least 90%, at least 91%, at least 92%, at least 93%, at least 94%, at least 95%, at least 96%, at least 97%, at least 98%, or at least 99% sequence identity to the amino acid sequence of SEQ ID NO:201. In some embodiments, the antibody or antigen binding fragment provided herein comprises a VH domain having at least 75%, at least 80%, at least 85%, at least 90%, at least 91%, at least 92%, at least 93%, at least 94%, at least 95%, at least 96%, at least 97%, at least 98%, or at least 99% sequence identity to the amino acid sequence of SEQ ID NO:202, and a VL domain having at least 75%, at least 80%, at least 85%, at least 90%, at least 91%, at least 92%, at least 93%, at least 94%, at least 95%, at least 96%, at least 97%, at least 98%, or at least 99% sequence identity to the amino acid sequence of SEQ ID NO:203. In some embodiments, the antibody or antigen binding fragment provided herein comprises a VH domain having at least 75%, at least 80%, at least 85%, at least 90%, at least 91%, at least 92%, at least 93%, at least 94%, at least 95%, at least 96%, at least 97%, at least 98%, or at least 99% sequence identity to the amino acid sequence of SEQ ID NO:204, and a VL domain having at least 75%, at least 80%, at least 85%, at least 90%, at least 91%, at least 92%, at least 93%, at least 94%, at least 95%, at least 96%, at least 97%, at least 98%, or at least 99% sequence identity to the amino acid sequence of SEQ ID NO:205. In some embodiments, the antibody or antigen binding fragment provided herein comprises a VH domain having at least 75%, at least 80%, at least 85%, at least 90%, at least 91%, at least 92%, at least 93%, at least 94%, at least 95%, at least 96%, at least 97%, at least 98%, or at least 99% sequence identity to the amino acid sequence of SEQ ID NO:206, and a VL domain having at least 75%, at least 80%, at least 85%, at least 90%, at least 91%, at least 92%, at least 93%, at least 94%, at least 95%, at least 96%, at least 97%, at least 98%, or at least 99% sequence identity to the amino acid sequence of SEQ ID NO:207. In some embodiments, the antibody or antigen binding fragment provided herein comprises a VH domain having at least 75%, at least 80%, at least 85%, at least 90%, at least 91%, at least 92%, at least 93%, at least 94%, at least 95%, at least 96%, at least 97%, at least 98%, or at least 99% sequence identity to the amino acid sequence of SEQ ID NO:208, and a VL domain having at least 75%, at least 80%, at least 85%, at least 90%, at least 91%, at least 92%, at least 93%, at least 94%, at least 95%, at least 96%, at least 97%, at least 98%, or at least 99% sequence identity to the amino acid sequence of SEQ ID NO:209. In some embodiments, the antibody or antigen binding fragment provided herein comprises a VH domain having at least 75%, at least 80%, at least 85%, at least 90%, at least 91%, at least 92%, at least 93%, at least 94%, at least 95%, at least 96%, at least 97%, at least 98%, or at least 99% sequence identity to the amino acid sequence of SEQ ID NO:210, and a VL domain having at least 75%, at least 80%, at least 85%, at least 90%, at least 91%, at least 92%, at least 93%, at least 94%, at least 95%, at least 96%, at least 97%, at least 98%, or at least 99% sequence identity to the amino acid sequence of SEQ ID NO:211. In some embodiments, the antibody or antigen binding fragment provided herein comprises a VH domain having at least 75%, at least 80%, at least 85%, at least 90%, at least 91%, at least 92%, at least 93%, at least 94%, at least 95%, at least 96%, at least 97%, at least 98%, or at least 99% sequence identity to the amino acid sequence of SEQ ID NO:212, and a VL domain having at least 75%, at least 80%, at least 85%, at least 90%, at least 91%, at least 92%, at least 93%, at least 94%, at least 95%, at least 96%, at least 97%, at least 98%, or at least 99% sequence identity to the amino acid sequence of SEQ ID NO:213. In some embodiments, the antibody or antigen binding fragment provided herein comprises a VH domain having at least 75%, at least 80%, at least 85%, at least 90%, at least 91%, at least 92%, at least 93%, at least 94%, at least 95%, at least 96%, at least 97%, at least 98%, or at least 99% sequence identity to the amino acid sequence of SEQ ID NO:214, and a VL domain having at least 75%, at least 80%, at least 85%, at least 90%, at least 91%, at least 92%, at least 93%, at least 94%, at least 95%, at least 96%, at least 97%, at least 98%, or at least 99% sequence identity to the amino acid sequence of SEQ ID NO:215. In some embodiments, the antibody or antigen binding fragment provided herein comprises a VH domain having at least 75%, at least 80%, at least 85%, at least 90%, at least 91%, at least 92%, at least 93%, at least 94%, at least 95%, at least 96%, at least 97%, at least 98%, or at least 99% sequence identity to the amino acid sequence of SEQ ID NO:216, and a VL domain having at least 75%, at least 80%, at least 85%, at least 90%, at least 91%, at least 92%, at least 93%, at least 94%, at least 95%, at least 96%, at least 97%, at least 98%, or at least 99% sequence identity to the amino acid sequence of SEQ ID NO:217. In some embodiments, the antibody or antigen binding fragment provided herein comprises a VH domain having at least 75%, at least 80%, at least 85%, at least 90%, at least 91%, at least 92%, at least 93%, at least 94%, at least 95%, at least 96%, at least 97%, at least 98%, or at least 99% sequence identity to the amino acid sequence of SEQ ID NO:218, and a VL domain having at least 75%, at least 80%, at least 85%, at least 90%, at least 91%, at least 92%, at least 93%, at least 94%, at least 95%, at least 96%, at least 97%, at least 98%, or at least 99% sequence identity to the amino acid sequence of SEQ ID NO:219. In some embodiments, the antibody or antigen binding fragment provided herein comprises a VH domain having at least 75%, at least 80%, at least 85%, at least 90%, at least 91%, at least 92%, at least 93%, at least 94%, at least 95%, at least 96%, at least 97%, at least 98%, or at least 99% sequence identity to the amino acid sequence of SEQ ID NO:220, and a VL domain having at least 75%, at least 80%, at least 85%, at least 90%, at least 91%, at least 92%, at least 93%, at least 94%, at least 95%, at least 96%, at least 97%, at least 98%, or at least 99% sequence identity to the amino acid sequence of SEQ ID NO:221. In some embodiments, the antibody or antigen binding fragment provided herein comprises a VH domain having at least 75%, at least 80%, at least 85%, at least 90%, at least 91%, at least 92%, at least 93%, at least 94%, at least 95%, at least 96%, at least 97%, at least 98%, or at least 99% sequence identity to the amino acid sequence of SEQ ID NO:222, and a VL domain having at least 75%, at least 80%, at least 85%, at least 90%, at least 91%, at least 92%, at least 93%, at least 94%, at least 95%, at least 96%, at least 97%, at least 98%, or at least 99% sequence identity to the amino acid sequence of SEQ ID NO:223. In some embodiments, the antibody or antigen binding fragment provided herein comprises a VH domain having at least 75%, at least 80%, at least 85%, at least 90%, at least 91%, at least 92%, at least 93%, at least 94%, at least 95%, at least 96%, at least 97%, at least 98%, or at least 99% sequence identity to the amino acid sequence of SEQ ID NO:226, and a VL domain having at least 75%, at least 80%, at least 85%, at least 90%, at least 91%, at least 92%, at least 93%, at least 94%, at least 95%, at least 96%, at least 97%, at least 98%, or at least 99% sequence identity to the amino acid sequence of SEQ ID NO:227. In some embodiments, the antibody or antigen binding fragment provided herein comprises a VH domain having at least 75%, at least 80%, at least 85%, at least 90%, at least 91%, at least 92%, at least 93%, at least 94%, at least 95%, at least 96%, at least 97%, at least 98%, or at least 99% sequence identity to the amino acid sequence of SEQ ID NO:228, and a VL domain having at least 75%, at least 80%, at least 85%, at least 90%, at least 91%, at least 92%, at least 93%, at least 94%, at least 95%, at least 96%, at least 97%, at least 98%, or at least 99% sequence identity to the amino acid sequence of SEQ ID NO:229. In some embodiments, the antibody or antigen binding fragment provided herein comprises a VH domain having at least 75%, at least 80%, at least 85%, at least 90%, at least 91%, at least 92%, at least 93%, at least 94%, at least 95%, at least 96%, at least 97%, at least 98%, or at least 99% sequence identity to the amino acid sequence of SEQ ID NO:230, and a VL domain having at least 75%, at least 80%, at least 85%, at least 90%, at least 91%, at least 92%, at least 93%, at least 94%, at least 95%, at least 96%, at least 97%, at least 98%, or at least 99% sequence identity to the amino acid sequence of SEQ ID NO:231. In some embodiments, the antibody or antigen binding fragment provided herein comprises a VH domain having at least 75%, at least 80%, at least 85%, at least 90%, at least 91%, at least 92%, at least 93%, at least 94%, at least 95%, at least 96%, at least 97%, at least 98%, or at least 99% sequence identity to the amino acid sequence of SEQ ID NO:232, and a VL domain having at least 75%, at least 80%, at least 85%, at least 90%, at least 91%, at least 92%, at least 93%, at least 94%, at least 95%, at least 96%, at least 97%, at least 98%, or at least 99% sequence identity to the amino acid sequence of SEQ ID NO:233. In some embodiments, the antibody or antigen binding fragment provided herein comprises a VH domain having at least 75%, at least 80%, at least 85%, at least 90%, at least 91%, at least 92%, at least 93%, at least 94%, at least 95%, at least 96%, at least 97%, at least 98%, or at least 99% sequence identity to the amino acid sequence of SEQ ID NO:234, and a VL domain having at least 75%, at least 80%, at least 85%, at least 90%, at least 91%, at least 92%, at least 93%, at least 94%, at least 95%, at least 96%, at least 97%, at least 98%, or at least 99% sequence identity to the amino acid sequence of SEQ ID NO:235. In some embodiments, the antibody or antigen binding fragment provided herein comprises a VH domain having at least 75%, at least 80%, at least 85%, at least 90%, at least 91%, at least 92%, at least 93%, at least 94%, at least 95%, at least 96%, at least 97%, at least 98%, or at least 99% sequence identity to the amino acid sequence of SEQ ID NO:236, and a VL domain having at least 75%, at least 80%, at least 85%, at least 90%, at least 91%, at least 92%, at least 93%, at least 94%, at least 95%, at least 96%, at least 97%, at least 98%, or at least 99% sequence identity to the amino acid sequence of SEQ ID NO:237. In some embodiments, the antibody or antigen binding fragment provided herein comprises a VH domain having at least 75%, at least 80%, at least 85%, at least 90%, at least 91%, at least 92%, at least 93%, at least 94%, at least 95%, at least 96%, at least 97%, at least 98%, or at least 99% sequence identity to the amino acid sequence of SEQ ID NO:238, and a VL domain having at least 75%, at least 80%, at least 85%, at least 90%, at least 91%, at least 92%, at least 93%, at least 94%, at least 95%, at least 96%, at least 97%, at least 98%, or at least 99% sequence identity to the amino acid sequence of SEQ ID NO:239. In some embodiments, the antibody or antigen binding fragment provided herein comprises a VH domain having at least 75%, at least 80%, at least 85%, at least 90%, at least 91%, at least 92%, at least 93%, at least 94%, at least 95%, at least 96%, at least 97%, at least 98%, or at least 99% sequence identity to the amino acid sequence of SEQ ID NO:240, and a VL domain having at least 75%, at least 80%, at least 85%, at least 90%, at least 91%, at least 92%, at least 93%, at least 94%, at least 95%, at least 96%, at least 97%, at least 98%, or at least 99% sequence identity to the amino acid sequence of SEQ ID NO:241. In some embodiments, the antibody or antigen binding fragment provided herein comprises a VH domain having at least 75%, at least 80%, at least 85%, at least 90%, at least 91%, at least 92%, at least 93%, at least 94%, at least 95%, at least 96%, at least 97%, at least 98%, or at least 99% sequence identity to the amino acid sequence of SEQ ID NO:246, and a VL domain having at least 75%, at least 80%, at least 85%, at least 90%, at least 91%, at least 92%, at least 93%, at least 94%, at least 95%, at least 96%, at least 97%, at least 98%, or at least 99% sequence identity to the amino acid sequence of SEQ ID NO:247. In some embodiments, the antibody or antigen binding fragment provided herein comprises a VH domain having at least 75%, at least 80%, at least 85%, at least 90%, at least 91%, at least 92%, at least 93%, at least 94%, at least 95%, at least 96%, at least 97%, at least 98%, or at least 99% sequence identity to the amino acid sequence of SEQ ID NO:248, and a VL domain having at least 75%, at least 80%, at least 85%, at least 90%, at least 91%, at least 92%, at least 93%, at least 94%, at least 95%, at least 96%, at least 97%, at least 98%, or at least 99% sequence identity to the amino acid sequence of SEQ ID NO:249. In some embodiments, the antibody or antigen binding fragment provided herein comprises a VH domain having at least 75%, at least 80%, at least 85%, at least 90%, at least 91%, at least 92%, at least 93%, at least 94%, at least 95%, at least 96%, at least 97%, at least 98%, or at least 99% sequence identity to the amino acid sequence of SEQ ID NO:250, and a VL domain having at least 75%, at least 80%, at least 85%, at least 90%, at least 91%, at least 92%, at least 93%, at least 94%, at least 95%, at least 96%, at least 97%, at least 98%, or at least 99% sequence identity to the amino acid sequence of SEQ ID NO:251. In some embodiments, the antibody or antigen binding fragment provided herein comprises a VH domain having at least 75%, at least 80%, at least 85%, at least 90%, at least 91%, at least 92%, at least 93%, at least 94%, at least 95%, at least 96%, at least 97%, at least 98%, or at least 99% sequence identity to the amino acid sequence of SEQ ID NO:252, and a VL domain having at least 75%, at least 80%, at least 85%, at least 90%, at least 91%, at least 92%, at least 93%, at least 94%, at least 95%, at least 96%, at least 97%, at least 98%, or at least 99% sequence identity to the amino acid sequence of SEQ ID NO:253. In some embodiments, the antibody or antigen binding fragment provided herein comprises a VH domain having at least 75%, at least 80%, at least 85%, at least 90%, at least 91%, at least 92%, at least 93%, at least 94%, at least 95%, at least 96%, at least 97%, at least 98%, or at least 99% sequence identity to the amino acid sequence of SEQ ID NO:254, and a VL domain having at least 75%, at least 80%, at least 85%, at least 90%, at least 91%, at least 92%, at least 93%, at least 94%, at least 95%, at least 96%, at least 97%, at least 98%, or at least 99% sequence identity to the amino acid sequence of SEQ ID NO:255. In some embodiments, the antibody or antigen binding fragment provided herein comprises a VH domain having at least 75%, at least 80%, at least 85%, at least 90%, at least 91%, at least 92%, at least 93%, at least 94%, at least 95%, at least 96%, at least 97%, at least 98%, or at least 99% sequence identity to the amino acid sequence of SEQ ID NO:256, and a VL domain having at least 75%, at least 80%, at least 85%, at least 90%, at least 91%, at least 92%, at least 93%, at least 94%, at least 95%, at least 96%, at least 97%, at least 98%, or at least 99% sequence identity to the amino acid sequence of SEQ ID NO:257. In some embodiments, the antibody or antigen binding fragment provided herein comprises a VH domain having at least 75%, at least 80%, at least 85%, at least 90%, at least 91%, at least 92%, at least 93%, at least 94%, at least 95%, at least 96%, at least 97%, at least 98%, or at least 99% sequence identity to the amino acid sequence of SEQ ID NO:258, and a VL domain having at least 75%, at least 80%, at least 85%, at least 90%, at least 91%, at least 92%, at least 93%, at least 94%, at least 95%, at least 96%, at least 97%, at least 98%, or at least 99% sequence identity to the amino acid sequence of SEQ ID NO:259. In some embodiments, the antibody or antigen binding fragment provided herein comprises a VH domain having at least 75%, at least 80%, at least 85%, at least 90%, at least 91%, at least 92%, at least 93%, at least 94%, at least 95%, at least 96%, at least 97%, at least 98%, or at least 99% sequence identity to the amino acid sequence of SEQ ID NO:260, and a VL domain having at least 75%, at least 80%, at least 85%, at least 90%, at least 91%, at least 92%, at least 93%, at least 94%, at least 95%, at least 96%, at least 97%, at least 98%, or at least 99% sequence identity to the amino acid sequence of SEQ ID NO:261. In some embodiments, the antibody or antigen binding fragment provided herein comprises a VH domain having at least 75%, at least 80%, at least 85%, at least 90%, at least 91%, at least 92%, at least 93%, at least 94%, at least 95%, at least 96%, at least 97%, at least 98%, or at least 99% sequence identity to the amino acid sequence of SEQ ID NO:262, and a LCDR1, an LCDR2, and an LCDR3 as set forth in SEQ ID NO:263. In some embodiments, the antibody or antigen binding fragment provided herein comprises a VH domain having at least 75%, at least 80%, at least 85%, at least 90%, at least 91%, at least 92%, at least 93%, at least 94%, at least 95%, at least 96%, at least 97%, at least 98%, or at least 99% sequence identity to the amino acid sequence of SEQ ID NO:264, and a VL domain having at least 75%, at least 80%, at least 85%, at least 90%, at least 91%, at least 92%, at least 93%, at least 94%, at least 95%, at least 96%, at least 97%, at least 98%, or at least 99% sequence identity to the amino acid sequence of SEQ ID NO:265. In some embodiments, the antibody or antigen binding fragment provided herein comprises a VH domain having at least 75%, at least 80%, at least 85%, at least 90%, at least 91%, at least 92%, at least 93%, at least 94%, at least 95%, at least 96%, at least 97%, at least 98%, or at least 99% sequence identity to the amino acid sequence of SEQ ID NO:268, and a VL domain having at least 75%, at least 80%, at least 85%, at least 90%, at least 91%, at least 92%, at least 93%, at least 94%, at least 95%, at least 96%, at least 97%, at least 98%, or at least 99% sequence identity to the amino acid sequence of SEQ ID NO:269. In some embodiments, the antibody or antigen binding fragment provided herein comprises a VH domain having at least 75%, at least 80%, at least 85%, at least 90%, at least 91%, at least 92%, at least 93%, at least 94%, at least 95%, at least 96%, at least 97%, at least 98%, or at least 99% sequence identity to the amino acid sequence of SEQ ID NO:786, and a VL domain having at least 75%, at least 80%, at least 85%, at least 90%, at least 91%, at least 92%, at least 93%, at least 94%, at least 95%, at least 96%, at least 97%, at least 98%, or at least 99% sequence identity to the amino acid sequence of SEQ ID NO:787. In some embodiments, the antibody or antigen binding fragment provided herein comprises a VH domain having at least 75%, at least 80%, at least 85%, at least 90%, at least 91%, at least 92%, at least 93%, at least 94%, at least 95%, at least 96%, at least 97%, at least 98%, or at least 99% sequence identity to the amino acid sequence of SEQ ID NO:788, and a VL domain having at least 75%, at least 80%, at least 85%, at least 90%, at least 91%, at least 92%, at least 93%, at least 94%, at least 95%, at least 96%, at least 97%, at least 98%, or at least 99% sequence identity to the amino acid sequence of SEQ ID NO:789. In some embodiments, the antibody or antigen binding fragment provided herein comprises a VH domain having at least 75%, at least 80%, at least 85%, at least 90%, at least 91%, at least 92%, at least 93%, at least 94%, at least 95%, at least 96%, at least 97%, at least 98%, or at least 99% sequence identity to the amino acid sequence of SEQ ID NO:790, and a VL domain having at least 75%, at least 80%, at least 85%, at least 90%, at least 91%, at least 92%, at least 93%, at least 94%, at least 95%, at least 96%, at least 97%, at least 98%, or at least 99% sequence identity to the amino acid sequence of SEQ ID NO:791. In some embodiments, the antibody or antigen binding fragment provided herein comprises a VH domain having at least 75%, at least 80%, at least 85%, at least 90%, at least 91%, at least 92%, at least 93%, at least 94%, at least 95%, at least 96%, at least 97%, at least 98%, or at least 99% sequence identity to the amino acid sequence of SEQ ID NO:792, and a VL domain having at least 75%, at least 80%, at least 85%, at least 90%, at least 91%, at least 92%, at least 93%, at least 94%, at least 95%, at least 96%, at least 97%, at least 98%, or at least 99% sequence identity to the amino acid sequence of SEQ ID NO:793. In some embodiments, the antibody or antigen binding fragment provided herein comprises a VH domain having at least 75%, at least 80%, at least 85%, at least 90%, at least 91%, at least 92%, at least 93%, at least 94%, at least 95%, at least 96%, at least 97%, at least 98%, or at least 99% sequence identity to the amino acid sequence of SEQ ID NO:798, and a VL domain having at least 75%, at least 80%, at least 85%, at least 90%, at least 91%, at least 92%, at least 93%, at least 94%, at least 95%, at least 96%, at least 97%, at least 98%, or at least 99% sequence identity to the amino acid sequence of SEQ ID NO:799. In some embodiments, the antibody or antigen binding fragment provided herein comprises a VH domain having at least 75%, at least 80%, at least 85%, at least 90%, at least 91%, at least 92%, at least 93%, at least 94%, at least 95%, at least 96%, at least 97%, at least 98%, or at least 99% sequence identity to the amino acid sequence of SEQ ID NO:806, and a VL domain having at least 75%, at least 80%, at least 85%, at least 90%, at least 91%, at least 92%, at least 93%, at least 94%, at least 95%, at least 96%, at least 97%, at least 98%, or at least 99% sequence identity to the amino acid sequence of SEQ ID NO:807. In some embodiments, the antibody or antigen binding fragment provided herein comprises a VH domain having at least 75%, at least 80%, at least 85%, at least 90%, at least 91%, at least 92%, at least 93%, at least 94%, at least 95%, at least 96%, at least 97%, at least 98%, or at least 99% sequence identity to the amino acid sequence of SEQ ID NO:808, and a VL domain having at least 75%, at least 80%, at least 85%, at least 90%, at least 91%, at least 92%, at least 93%, at least 94%, at least 95%, at least 96%, at least 97%, at least 98%, or at least 99% sequence identity to the amino acid sequence of SEQ ID NO:809. In some embodiments, the antibody or antigen binding fragment provided herein comprises a VH domain having at least 75%, at least 80%, at least 85%, at least 90%, at least 91%, at least 92%, at least 93%, at least 94%, at least 95%, at least 96%, at least 97%, at least 98%, or at least 99% sequence identity to the amino acid sequence of SEQ ID NO:810, and a VL domain having at least 75%, at least 80%, at least 85%, at least 90%, at least 91%, at least 92%, at least 93%, at least 94%, at least 95%, at least 96%, at least 97%, at least 98%, or at least 99% sequence identity to the amino acid sequence of SEQ ID NO:811. In some embodiments, the antibody or antigen binding fragment provided herein comprises a VH domain having at least 75%, at least 80%, at least 85%, at least 90%, at least 91%, at least 92%, at least 93%, at least 94%, at least 95%, at least 96%, at least 97%, at least 98%, or at least 99% sequence identity to the amino acid sequence of SEQ ID NO:812, and a VL domain having at least 75%, at least 80%, at least 85%, at least 90%, at least 91%, at least 92%, at least 93%, at least 94%, at least 95%, at least 96%, at least 97%, at least 98%, or at least 99% sequence identity to the amino acid sequence of SEQ ID NO:813. In some embodiments, the antibody or antigen binding fragment provided herein comprises a VH domain having at least 75%, at least 80%, at least 85%, at least 90%, at least 91%, at least 92%, at least 93%, at least 94%, at least 95%, at least 96%, at least 97%, at least 98%, or at least 99% sequence identity to the amino acid sequence of SEQ ID NO:814, and a VL domain having at least 75%, at least 80%, at least 85%, at least 90%, at least 91%, at least 92%, at least 93%, at least 94%, at least 95%, at least 96%, at least 97%, at least 98%, or at least 99% sequence identity to the amino acid sequence of SEQ ID NO:815. In some embodiments, the antibody or antigen binding fragment provided herein comprises a VH domain having at least 75%, at least 80%, at least 85%, at least 90%, at least 91%, at least 92%, at least 93%, at least 94%, at least 95%, at least 96%, at least 97%, at least 98%, or at least 99% sequence identity to the amino acid sequence of SEQ ID NO:816, and a VL domain having at least 75%, at least 80%, at least 85%, at least 90%, at least 91%, at least 92%, at least 93%, at least 94%, at least 95%, at least 96%, at least 97%, at least 98%, or at least 99% sequence identity to the amino acid sequence of SEQ ID NO:817. In some embodiments, the antibody or antigen binding fragment provided herein comprises a VH domain having at least 75%, at least 80%, at least 85%, at least 90%, at least 91%, at least 92%, at least 93%, at least 94%, at least 95%, at least 96%, at least 97%, at least 98%, or at least 99% sequence identity to the amino acid sequence of SEQ ID NO:818, and a VL domain having at least 75%, at least 80%, at least 85%, at least 90%, at least 91%, at least 92%, at least 93%, at least 94%, at least 95%, at least 96%, at least 97%, at least 98%, or at least 99% sequence identity to the amino acid sequence of SEQ ID NO:819. In some embodiments, the antibody or antigen binding fragment provided herein comprises a VH domain having at least 75%, at least 80%, at least 85%, at least 90%, at least 91%, at least 92%, at least 93%, at least 94%, at least 95%, at least 96%, at least 97%, at least 98%, or at least 99% sequence identity to the amino acid sequence of SEQ ID NO:820, and a VL domain having at least 75%, at least 80%, at least 85%, at least 90%, at least 91%, at least 92%, at least 93%, at least 94%, at least 95%, at least 96%, at least 97%, at least 98%, or at least 99% sequence identity to the amino acid sequence of SEQ ID NO:821. In some embodiments, the antibody or antigen binding fragment provided herein comprises a VH domain having at least 75%, at least 80%, at least 85%, at least 90%, at least 91%, at least 92%, at least 93%, at least 94%, at least 95%, at least 96%, at least 97%, at least 98%, or at least 99% sequence identity to the amino acid sequence of SEQ ID NO:822, and a VL domain having at least 75%, at least 80%, at least 85%, at least 90%, at least 91%, at least 92%, at least 93%, at least 94%, at least 95%, at least 96%, at least 97%, at least 98%, or at least 99% sequence identity to the amino acid sequence of SEQ ID NO:823. In some embodiments, the antibody or antigen binding fragment provided herein comprises a VH domain having at least 75%, at least 80%, at least 85%, at least 90%, at least 91%, at least 92%, at least 93%, at least 94%, at least 95%, at least 96%, at least 97%, at least 98%, or at least 99% sequence identity to the amino acid sequence of SEQ ID NO:824, and a VL domain having at least 75%, at least 80%, at least 85%, at least 90%, at least 91%, at least 92%, at least 93%, at least 94%, at least 95%, at least 96%, at least 97%, at least 98%, or at least 99% sequence identity to the amino acid sequence of SEQ ID NO:825. In some embodiments, the antibody or antigen binding fragment provided herein comprises a VH domain having at least 75%, at least 80%, at least 85%, at least 90%, at least 91%, at least 92%, at least 93%, at least 94%, at least 95%, at least 96%, at least 97%, at least 98%, or at least 99% sequence identity to the amino acid sequence of SEQ ID NO:826, and a VL domain having at least 75%, at least 80%, at least 85%, at least 90%, at least 91%, at least 92%, at least 93%, at least 94%, at least 95%, at least 96%, at least 97%, at least 98%, or at least 99% sequence identity to the amino acid sequence of SEQ ID NO:827. In some embodiments, the antibody or antigen binding fragment provided herein comprises a VH domain having at least 75%, at least 80%, at least 85%, at least 90%, at least 91%, at least 92%, at least 93%, at least 94%, at least 95%, at least 96%, at least 97%, at least 98%, or at least 99% sequence identity to the amino acid sequence of SEQ ID NO:828, and a VL domain having at least 75%, at least 80%, at least 85%, at least 90%, at least 91%, at least 92%, at least 93%, at least 94%, at least 95%, at least 96%, at least 97%, at least 98%, or at least 99% sequence identity to the amino acid sequence of SEQ ID NO:829. In some embodiments, the antibody or antigen binding fragment provided herein comprises a VH domain having at least 75%, at least 80%, at least 85%, at least 90%, at least 91%, at least 92%, at least 93%, at least 94%, at least 95%, at least 96%, at least 97%, at least 98%, or at least 99% sequence identity to the amino acid sequence of SEQ ID NO:830, and a VL domain having at least 75%, at least 80%, at least 85%, at least 90%, at least 91%, at least 92%, at least 93%, at least 94%, at least 95%, at least 96%, at least 97%, at least 98%, or at least 99% sequence identity to the amino acid sequence of SEQ ID NO:831. In some embodiments, the antibody or antigen binding fragment provided herein comprises a VH domain having at least 75%, at least 80%, at least 85%, at least 90%, at least 91%, at least 92%, at least 93%, at least 94%, at least 95%, at least 96%, at least 97%, at least 98%, or at least 99% sequence identity to the amino acid sequence of SEQ ID NO:832, and a VL domain having at least 75%, at least 80%, at least 85%, at least 90%, at least 91%, at least 92%, at least 93%, at least 94%, at least 95%, at least 96%, at least 97%, at least 98%, or at least 99% sequence identity to the amino acid sequence of SEQ ID NO:833. In some embodiments, the antibody or antigen binding fragment provided herein comprises a VH domain having at least 75%, at least 80%, at least 85%, at least 90%, at least 91%, at least 92%, at least 93%, at least 94%, at least 95%, at least 96%, at least 97%, at least 98%, or at least 99% sequence identity to the amino acid sequence of SEQ ID NO:836, and a VL domain having at least 75%, at least 80%, at least 85%, at least 90%, at least 91%, at least 92%, at least 93%, at least 94%, at least 95%, at least 96%, at least 97%, at least 98%, or at least 99% sequence identity to the amino acid sequence of SEQ ID NO:837. In some embodiments, the antibody or antigen binding fragment provided herein comprises a VH domain having at least 75%, at least 80%, at least 85%, at least 90%, at least 91%, at least 92%, at least 93%, at least 94%, at least 95%, at least 96%, at least 97%, at least 98%, or at least 99% sequence identity to the amino acid sequence of SEQ ID NO:838, and a VL domain having at least 75%, at least 80%, at least 85%, at least 90%, at least 91%, at least 92%, at least 93%, at least 94%, at least 95%, at least 96%, at least 97%, at least 98%, or at least 99% sequence identity to the amino acid sequence of SEQ ID NO:839. In some embodiments, the antibody or antigen binding fragment provided herein comprises a VH domain having at least 75%, at least 80%, at least 85%, at least 90%, at least 91%, at least 92%, at least 93%, at least 94%, at least 95%, at least 96%, at least 97%, at least 98%, or at least 99% sequence identity to the amino acid sequence of SEQ ID NO:840, and a VL domain having at least 75%, at least 80%, at least 85%, at least 90%, at least 91%, at least 92%, at least 93%, at least 94%, at least 95%, at least 96%, at least 97%, at least 98%, or at least 99% sequence identity to the amino acid sequence of SEQ ID NO:841. In some embodiments, the antibody or antigen binding fragment provided herein comprises a VH domain having at least 75%, at least 80%, at least 85%, at least 90%, at least 91%, at least 92%, at least 93%, at least 94%, at least 95%, at least 96%, at least 97%, at least 98%, or at least 99% sequence identity to the amino acid sequence of SEQ ID NO: 842, and a VL domain having at least 75%, at least 80%, at least 85%, at least 90%, at least 91%, at least 92%, at least 93%, at least 94%, at least 95%, at least 96%, at least 97%, at least 98%, or at least 99% sequence identity to the amino acid sequence of SEQ ID NO:843. In some embodiments, the antibody or antigen binding fragment provided herein comprises a VH domain having at least 75%, at least 80%, at least 85%, at least 90%, at least 91%, at least 92%, at least 93%, at least 94%, at least 95%, at least 96%, at least 97%, at least 98%, or at least 99% sequence identity to the amino acid sequence of SEQ ID NO:846, and a VL domain having at least 75%, at least 80%, at least 85%, at least 90%, at least 91%, at least 92%, at least 93%, at least 94%, at least 95%, at least 96%, at least 97%, at least 98%, or at least 99% sequence identity to the amino acid sequence of SEQ ID NO:847. In some embodiments, the antibody or antigen binding fragment provided herein comprises a VH domain having at least 75%, at least 80%, at least 85%, at least 90%, at least 91%, at least 92%, at least 93%, at least 94%, at least 95%, at least 96%, at least 97%, at least 98%, or at least 99% sequence identity to the amino acid sequence of SEQ ID NO:848, and a VL domain having at least 75%, at least 80%, at least 85%, at least 90%, at least 91%, at least 92%, at least 93%, at least 94%, at least 95%, at least 96%, at least 97%, at least 98%, or at least 99% sequence identity to the amino acid sequence of SEQ ID NO:849. In some embodiments, the antibody or antigen binding fragment provided herein comprises a VH domain having at least 75%, at least 80%, at least 85%, at least 90%, at least 91%, at least 92%, at least 93%, at least 94%, at least 95%, at least 96%, at least 97%, at least 98%, or at least 99% sequence identity to the amino acid sequence of SEQ ID NO:850, and a VL domain having at least 75%, at least 80%, at least 85%, at least 90%, at least 91%, at least 92%, at least 93%, at least 94%, at least 95%, at least 96%, at least 97%, at least 98%, or at least 99% sequence identity to the amino acid sequence of SEQ ID NO:851. In some embodiments, the antibody or antigen binding fragment provided herein comprises a VH domain having at least 75%, at least 80%, at least 85%, at least 90%, at least 91%, at least 92%, at least 93%, at least 94%, at least 95%, at least 96%, at least 97%, at least 98%, or at least 99% sequence identity to the amino acid sequence of SEQ ID NO:852, and a VL domain having at least 75%, at least 80%, at least 85%, at least 90%, at least 91%, at least 92%, at least 93%, at least 94%, at least 95%, at least 96%, at least 97%, at least 98%, or at least 99% sequence identity to the amino acid sequence of SEQ ID NO:853. In some embodiments, the antibody or antigen binding fragment provided herein comprises a VH domain having at least 75%, at least 80%, at least 85%, at least 90%, at least 91%, at least 92%, at least 93%, at least 94%, at least 95%, at least 96%, at least 97%, at least 98%, or at least 99% sequence identity to the amino acid sequence of SEQ ID NO:854, and a VL domain having at least 75%, at least 80%, at least 85%, at least 90%, at least 91%, at least 92%, at least 93%, at least 94%, at least 95%, at least 96%, at least 97%, at least 98%, or at least 99% sequence identity to the amino acid sequence of SEQ ID NO:855. In some embodiments, the antibody or antigen binding fragment provided herein comprises a VH domain having at least 75%, at least 80%, at least 85%, at least 90%, at least 91%, at least 92%, at least 93%, at least 94%, at least 95%, at least 96%, at least 97%, at least 98%, or at least 99% sequence identity to the amino acid sequence of SEQ ID NO:856, and a VL domain having at least 75%, at least 80%, at least 85%, at least 90%, at least 91%, at least 92%, at least 93%, at least 94%, at least 95%, at least 96%, at least 97%, at least 98%, or at least 99% sequence identity to the amino acid sequence of SEQ ID NO:857. In some embodiments, the antibody or antigen binding fragment provided herein comprises a VH domain having at least 75%, at least 80%, at least 85%, at least 90%, at least 91%, at least 92%, at least 93%, at least 94%, at least 95%, at least 96%, at least 97%, at least 98%, or at least 99% sequence identity to the amino acid sequence of SEQ ID NO:858, and a VL domain having at least 75%, at least 80%, at least 85%, at least 90%, at least 91%, at least 92%, at least 93%, at least 94%, at least 95%, at least 96%, at least 97%, at least 98%, or at least 99% sequence identity to the amino acid sequence of SEQ ID NO:859. In some embodiments, the antibody or antigen binding fragment provided herein comprises a VH domain having at least 75%, at least 80%, at least 85%, at least 90%, at least 91%, at least 92%, at least 93%, at least 94%, at least 95%, at least 96%, at least 97%, at least 98%, or at least 99% sequence identity to the amino acid sequence of SEQ ID NO:860, and a VL domain having at least 75%, at least 80%, at least 85%, at least 90%, at least 91%, at least 92%, at least 93%, at least 94%, at least 95%, at least 96%, at least 97%, at least 98%, or at least 99% sequence identity to the amino acid sequence of SEQ ID NO:861. In some embodiments, the antibody or antigen binding fragment provided herein comprises a VH domain having at least 75%, at least 80%, at least 85%, at least 90%, at least 91%, at least 92%, at least 93%, at least 94%, at least 95%, at least 96%, at least 97%, at least 98%, or at least 99% sequence identity to the amino acid sequence of SEQ ID NO:862, and a VL domain having at least 75%, at least 80%, at least 85%, at least 90%, at least 91%, at least 92%, at least 93%, at least 94%, at least 95%, at least 96%, at least 97%, at least 98%, or at least 99% sequence identity to the amino acid sequence of SEQ ID NO:863. In some embodiments, the antibody or antigen binding fragment provided herein comprises a VH domain having at least 75%, at least 80%, at least 85%, at least 90%, at least 91%, at least 92%, at least 93%, at least 94%, at least 95%, at least 96%, at least 97%, at least 98%, or at least 99% sequence identity to the amino acid sequence of SEQ ID NO:864, and a VL domain having at least 75%, at least 80%, at least 85%, at least 90%, at least 91%, at least 92%, at least 93%, at least 94%, at least 95%, at least 96%, at least 97%, at least 98%, or at least 99% sequence identity to the amino acid sequence of SEQ ID NO:865. In some embodiments, the antibody or antigen binding fragment provided herein comprises a VH domain having at least 75%, at least 80%, at least 85%, at least 90%, at least 91%, at least 92%, at least 93%, at least 94%, at least 95%, at least 96%, at least 97%, at least 98%, or at least 99% sequence identity to the amino acid sequence of SEQ ID NO:866, and a VL domain having at least 75%, at least 80%, at least 85%, at least 90%, at least 91%, at least 92%, at least 93%, at least 94%, at least 95%, at least 96%, at least 97%, at least 98%, or at least 99% sequence identity to the amino acid sequence of SEQ ID NO:867. In some embodiments, the antibody or antigen binding fragment provided herein comprises a VH domain having at least 75%, at least 80%, at least 85%, at least 90%, at least 91%, at least 92%, at least 93%, at least 94%, at least 95%, at least 96%, at least 97%, at least 98%, or at least 99% sequence identity to the amino acid sequence of SEQ ID NO:868, and a VL domain having at least 75%, at least 80%, at least 85%, at least 90%, at least 91%, at least 92%, at least 93%, at least 94%, at least 95%, at least 96%, at least 97%, at least 98%, or at least 99% sequence identity to the amino acid sequence of SEQ ID NO:869. In some embodiments, the antibody or antigen binding fragment provided herein comprises a VH domain having at least 75%, at least 80%, at least 85%, at least 90%, at least 91%, at least 92%, at least 93%, at least 94%, at least 95%, at least 96%, at least 97%, at least 98%, or at least 99% sequence identity to the amino acid sequence of SEQ ID NO:870, and a VL domain having at least 75%, at least 80%, at least 85%, at least 90%, at least 91%, at least 92%, at least 93%, at least 94%, at least 95%, at least 96%, at least 97%, at least 98%, or at least 99% sequence identity to the amino acid sequence of SEQ ID NO:871. In some embodiments, the antibody or antigen binding fragment provided herein comprises a VH domain having at least 75%, at least 80%, at least 85%, at least 90%, at least 91%, at least 92%, at least 93%, at least 94%, at least 95%, at least 96%, at least 97%, at least 98%, or at least 99% sequence identity to the amino acid sequence of SEQ ID NO:872, and a VL domain having at least 75%, at least 80%, at least 85%, at least 90%, at least 91%, at least 92%, at least 93%, at least 94%, at least 95%, at least 96%, at least 97%, at least 98%, or at least 99% sequence identity to the amino acid sequence of SEQ ID NO:873. In some embodiments, the antibody or antigen binding fragment provided herein comprises a VH domain having at least 75%, at least 80%, at least 85%, at least 90%, at least 91%, at least 92%, at least 93%, at least 94%, at least 95%, at least 96%, at least 97%, at least 98%, or at least 99% sequence identity to the amino acid sequence of SEQ ID NO:874, and a VL domain having at least 75%, at least 80%, at least 85%, at least 90%, at least 91%, at least 92%, at least 93%, at least 94%, at least 95%, at least 96%, at least 97%, at least 98%, or at least 99% sequence identity to the amino acid sequence of SEQ ID NO:875. In some embodiments, the antibody or antigen binding fragment provided herein comprises a VH domain having at least 75%, at least 80%, at least 85%, at least 90%, at least 91%, at least 92%, at least 93%, at least 94%, at least 95%, at least 96%, at least 97%, at least 98%, or at least 99% sequence identity to the amino acid sequence of SEQ ID NO:876, and a VL domain having at least 75%, at least 80%, at least 85%, at least 90%, at least 91%, at least 92%, at least 93%, at least 94%, at least 95%, at least 96%, at least 97%, at least 98%, or at least 99% sequence identity to the amino acid sequence of SEQ ID NO:877. In some embodiments, the antibody or antigen binding fragment provided herein comprises a VH domain having at least 75%, at least 80%, at least 85%, at least 90%, at least 91%, at least 92%, at least 93%, at least 94%, at least 95%, at least 96%, at least 97%, at least 98%, or at least 99% sequence identity to the amino acid sequence of SEQ ID NO:878, and a VL domain having at least 75%, at least 80%, at least 85%, at least 90%, at least 91%, at least 92%, at least 93%, at least 94%, at least 95%, at least 96%, at least 97%, at least 98%, or at least 99% sequence identity to the amino acid sequence of SEQ ID NO:879. In some embodiments, the antibody or antigen binding fragment provided herein comprises a VH domain having at least 75%, at least 80%, at least 85%, at least 90%, at least 91%, at least 92%, at least 93%, at least 94%, at least 95%, at least 96%, at least 97%, at least 98%, or at least 99% sequence identity to the amino acid sequence of SEQ ID NO:880, and a VL domain having at least 75%, at least 80%, at least 85%, at least 90%, at least 91%, at least 92%, at least 93%, at least 94%, at least 95%, at least 96%, at least 97%, at least 98%, or at least 99% sequence identity to the amino acid sequence of SEQ ID NO:881. In some embodiments, the antibody or antigen binding fragment provided herein comprises a VH domain having at least 75%, at least 80%, at least 85%, at least 90%, at least 91%, at least 92%, at least 93%, at least 94%, at least 95%, at least 96%, at least 97%, at least 98%, or at least 99% sequence identity to the amino acid sequence of SEQ ID NO:882, and a VL domain having at least 75%, at least 80%, at least 85%, at least 90%, at least 91%, at least 92%, at least 93%, at least 94%, at least 95%, at least 96%, at least 97%, at least 98%, or at least 99% sequence identity to the amino acid sequence of SEQ ID NO:883. In some embodiments, the antibody or antigen binding fragment provided herein comprises a VH domain having at least 75%, at least 80%, at least 85%, at least 90%, at least 91%, at least 92%, at least 93%, at least 94%, at least 95%, at least 96%, at least 97%, at least 98%, or at least 99% sequence identity to the amino acid sequence of SEQ ID NO:884, and a VL domain having at least 75%, at least 80%, at least 85%, at least 90%, at least 91%, at least 92%, at least 93%, at least 94%, at least 95%, at least 96%, at least 97%, at least 98%, or at least 99% sequence identity to the amino acid sequence of SEQ ID NO:885. In some embodiments, the antibody or antigen binding fragment provided herein comprises a VH domain having at least 75%, at least 80%, at least 85%, at least 90%, at least 91%, at least 92%, at least 93%, at least 94%, at least 95%, at least 96%, at least 97%, at least 98%, or at least 99% sequence identity to the amino acid sequence of SEQ ID NO:886, and a VL domain having at least 75%, at least 80%, at least 85%, at least 90%, at least 91%, at least 92%, at least 93%, at least 94%, at least 95%, at least 96%, at least 97%, at least 98%, or at least 99% sequence identity to the amino acid sequence of SEQ ID NO:887. In some embodiments, the antibody or antigen binding fragment provided herein comprises a VH domain having at least 75%, at least 80%, at least 85%, at least 90%, at least 91%, at least 92%, at least 93%, at least 94%, at least 95%, at least 96%, at least 97%, at least 98%, or at least 99% sequence identity to the amino acid sequence of SEQ ID NO:888, and a VL domain having at least 75%, at least 80%, at least 85%, at least 90%, at least 91%, at least 92%, at least 93%, at least 94%, at least 95%, at least 96%, at least 97%, at least 98%, or at least 99% sequence identity to the amino acid sequence of SEQ ID NO:889. In some embodiments, the antibody or antigen binding fragment provided herein comprises a VH domain having at least 75%, at least 80%, at least 85%, at least 90%, at least 91%, at least 92%, at least 93%, at least 94%, at least 95%, at least 96%, at least 97%, at least 98%, or at least 99% sequence identity to the amino acid sequence of SEQ ID NO:890, and a VL domain having at least 75%, at least 80%, at least 85%, at least 90%, at least 91%, at least 92%, at least 93%, at least 94%, at least 95%, at least 96%, at least 97%, at least 98%, or at least 99% sequence identity to the amino acid sequence of SEQ ID NO:891. In all the embodiments described above, the antibodies bind to IL-23R.

[0705] In some embodiments, functional epitopes can be mapped, e.g., by combinatorial alanine scanning, to identify amino acids in the IL-23R protein that are necessary for interaction with anti-IL-23R antibodies provided herein. In some embodiments, conformational and crystal structure of anti-IL-23R antibody bound to IL-23R may be employed to identify the epitopes. In some embodiments, the present disclosure provides an antibody that specifically binds to the same epitope as any of the anti-IL-23R antibodies provided herein. For example, in some embodiments, the antibody or antigen binding fragment provided herein binds to the same epitope as an anti-IL-23R antibody comprising a VH comprising the amino acid sequence of SEQ ID NO:138, and a VL comprising the amino acid sequence of SEQ ID NO:139. In some embodiments, the antibody or antigen binding fragment provided herein binds to the same epitope as an anti-IL-23R antibody comprising a VH comprising the amino acid sequence of SEQ ID NO:142, and a VL comprising the amino acid sequence of SEQ ID NO:143. In some embodiments, the antibody or antigen binding fragment provided herein binds to the same epitope as an anti-IL-23R antibody comprising a VH comprising the amino acid sequence of SEQ ID NO:144, and a VL comprising the amino acid sequence of SEQ ID NO:145. In some embodiments, the antibody or antigen binding fragment provided herein binds to the same epitope as an anti-IL-23R antibody comprising a VH comprising the amino acid sequence of SEQ ID NO:148, and a VL comprising the amino acid sequence of SEQ ID NO:149. In some embodiments, the antibody or antigen binding fragment provided herein binds to the same epitope as an anti-IL-23R antibody comprising a VH comprising the amino acid sequence of SEQ ID NO:150, and a VL comprising the amino acid sequence of SEQ ID NO:151. In some embodiments, the antibody or antigen binding fragment provided herein binds to the same epitope as an anti-IL-23R antibody comprising a VH comprising the amino acid sequence of SEQ ID NO:152, and a VL comprising the amino acid sequence of SEQ ID NO:153. In some embodiments, the antibody or antigen binding fragment provided herein binds to the same epitope as an anti-IL-23R antibody comprising a VH comprising the amino acid sequence of SEQ ID NO:154, and a VL comprising the amino acid sequence of SEQ ID NO:155. In some embodiments, the antibody or antigen binding fragment provided herein binds to the same epitope as an anti-IL-23R antibody comprising a VH comprising the amino acid sequence of SEQ ID NO:156, and a VL comprising the amino acid sequence of SEQ ID NO:157. In some embodiments, the antibody or antigen binding fragment provided herein binds to the same epitope as an anti-IL-23R antibody comprising a VH comprising the amino acid sequence of SEQ ID NO:158, and a VL comprising the amino acid sequence of SEQ ID NO:159. In some embodiments, the antibody or antigen binding fragment provided herein binds to the same epitope as an anti-IL-23R antibody comprising a VH comprising the amino acid sequence of SEQ ID NO:160, and a VL comprising the amino acid sequence of SEQ ID NO:161. In some embodiments, the antibody or antigen binding fragment provided herein binds to the same epitope as an anti-IL-23R antibody comprising a VH comprising the amino acid sequence of SEQ ID NO:162, and a VL comprising the amino acid sequence of SEQ ID NO:163. In some embodiments, the antibody or antigen binding fragment provided herein binds to the same epitope as an anti-IL-23R antibody comprising a VH comprising the amino acid sequence of SEQ ID NO:164, and a VL comprising the amino acid sequence of SEQ ID NO:165. In some embodiments, the antibody or antigen binding fragment provided herein binds to the same epitope as an anti-IL-23R antibody comprising a VH comprising the amino acid sequence of SEQ ID NO:166, and a VL comprising the amino acid sequence of SEQ ID NO:167. In some embodiments, the antibody or antigen binding fragment provided herein binds to the same epitope as an anti-IL-23R antibody comprising a VH comprising the amino acid sequence of SEQ ID NO:168, and a VL comprising the amino acid sequence of SEQ ID NO:169. In some embodiments, the antibody or antigen binding fragment provided herein binds to the same epitope as an anti-IL-23R antibody comprising a VH comprising the amino acid sequence of SEQ ID NO:170, and a VL comprising the amino acid sequence of SEQ ID NO:171. In some embodiments, the antibody or antigen binding fragment provided herein binds to the same epitope as an anti-IL-23R antibody comprising a VH comprising the amino acid sequence of SEQ ID NO:172, and a VL comprising the amino acid sequence of SEQ ID NO:173. In some embodiments, the antibody or antigen binding fragment provided herein binds to the same epitope as an anti-IL-23R antibody comprising a VH comprising the amino acid sequence of SEQ ID NO:174, and a VL comprising the amino acid sequence of SEQ ID NO:175. In some embodiments, the antibody or antigen binding fragment provided herein binds to the same epitope as an anti-IL-23R antibody comprising a VH comprising the amino acid sequence of SEQ ID NO:176, and a VL comprising the amino acid sequence of SEQ ID NO:177. In some embodiments, the antibody or antigen binding fragment provided herein binds to the same epitope as an anti-IL-23R antibody comprising a VH comprising the amino acid sequence of SEQ ID NO:178, and a VL comprising the amino acid sequence of SEQ ID NO:179. In some embodiments, the antibody or antigen binding fragment provided herein binds to the same epitope as an anti-IL-23R antibody comprising a VH comprising the amino acid sequence of SEQ ID NO:180, and a VL comprising the amino acid sequence of SEQ ID NO:181. In some embodiments, the antibody or antigen binding fragment provided herein binds to the same epitope as an anti-IL-23R antibody comprising a VH comprising the amino acid sequence of SEQ ID NO:182, and a VL comprising the amino acid sequence of SEQ ID NO:183. In some embodiments, the antibody or antigen binding fragment provided herein binds to the same epitope as an anti-IL-23R antibody comprising a VH comprising the amino acid sequence of SEQ ID NO:186, and a VL comprising the amino acid sequence of SEQ ID NO:187. In some embodiments, the antibody or antigen binding fragment provided herein binds to the same epitope as an anti-IL-23R antibody comprising a VH comprising the amino acid sequence of SEQ ID NO:188, and a VL comprising the amino acid sequence of SEQ ID NO:189. In some embodiments, the antibody or antigen binding fragment provided herein binds to the same epitope as an anti-IL-23R antibody comprising a VH comprising the amino acid sequence of SEQ ID NO:190, and a VL comprising the amino acid sequence of SEQ ID NO:191. In some embodiments, the antibody or antigen binding fragment provided herein binds to the same epitope as an anti-IL-23R antibody comprising a VH comprising the amino acid sequence of SEQ ID NO:192, and a VL comprising the amino acid sequence of SEQ ID NO:193. In some embodiments, the antibody or antigen binding fragment provided herein binds to the same epitope as an anti-IL-23R antibody comprising a VH comprising the amino acid sequence of SEQ ID NO:194, and a VL comprising the amino acid sequence of SEQ ID NO:195. In some embodiments, the antibody or antigen binding fragment provided herein binds to the same epitope as an anti-IL-23R antibody comprising a VH comprising the amino acid sequence of SEQ ID NO:196, and a VL comprising the amino acid sequence of SEQ ID NO:197. In some embodiments, the antibody or antigen binding fragment provided herein binds to the same epitope as an anti-IL-23R antibody comprising a VH comprising the amino acid sequence of SEQ ID NO:198, and a VL comprising the amino acid sequence of SEQ ID NO:199. In some embodiments, the antibody or antigen binding fragment provided herein binds to the same epitope as an anti-IL-23R antibody comprising a VH comprising the amino acid sequence of SEQ ID NO:200, and a VL comprising the amino acid sequence of SEQ ID NO:201. In some embodiments, the antibody or antigen binding fragment provided herein binds to the same epitope as an anti-IL-23R antibody comprising a VH comprising the amino acid sequence of SEQ ID NO:202, and a VL comprising the amino acid sequence of SEQ ID NO:203. In some embodiments, the antibody or antigen binding fragment provided herein binds to the same epitope as an anti-IL-23R antibody comprising a VH comprising the amino acid sequence of SEQ ID NO:204, and a VL comprising the amino acid sequence of SEQ ID NO:205. In some embodiments, the antibody or antigen binding fragment provided herein binds to the same epitope as an anti-IL-23R antibody comprising a VH comprising the amino acid sequence of SEQ ID NO:206, and a VL comprising the amino acid sequence of SEQ ID NO:207. In some embodiments, the antibody or antigen binding fragment provided herein binds to the same epitope as an anti-IL-23R antibody comprising a VH comprising the amino acid sequence of SEQ ID NO:208, and a VL comprising the amino acid sequence of SEQ ID NO:209. In some embodiments, the antibody or antigen binding fragment provided herein binds to the same epitope as an anti-IL-23R antibody comprising a VH comprising the amino acid sequence of SEQ ID NO:210, and a VL comprising the amino acid sequence of SEQ ID NO:211. In some embodiments, the antibody or antigen binding fragment provided herein binds to the same epitope as an anti-IL-23R antibody comprising a VH comprising the amino acid sequence of SEQ ID NO:212, and a VL comprising the amino acid sequence of SEQ ID NO:213. In some embodiments, the antibody or antigen binding fragment provided herein binds to the same epitope as an anti-IL-23R antibody comprising a VH comprising the amino acid sequence of SEQ ID NO:214, and a VL comprising the amino acid sequence of SEQ ID NO:215. In some embodiments, the antibody or antigen binding fragment provided herein binds to the same epitope as an anti-IL-23R antibody comprising a VH comprising the amino acid sequence of SEQ ID NO:216, and a VL comprising the amino acid sequence of SEQ ID NO:217. In some embodiments, the antibody or antigen binding fragment provided herein binds to the same epitope as an anti-IL-23R antibody comprising a VH comprising the amino acid sequence of SEQ ID NO:218, and a VL comprising the amino acid sequence of SEQ ID NO:219. In some embodiments, the antibody or antigen binding fragment provided herein binds to the same epitope as an anti-IL-23R antibody comprising a VH comprising the amino acid sequence of SEQ ID NO:220, and a VL comprising the amino acid sequence of SEQ ID NO:221. In some embodiments, the antibody or antigen binding fragment provided herein binds to the same epitope as an anti-IL-23R antibody comprising a VH comprising the amino acid sequence of SEQ ID NO:222, and a VL comprising the amino acid sequence of SEQ ID NO:223. In some embodiments, the antibody or antigen binding fragment provided herein binds to the same epitope as an anti-IL-23R antibody comprising a VH comprising the amino acid sequence of SEQ ID NO:226, and a VL comprising the amino acid sequence of SEQ ID NO:227. In some embodiments, the antibody or antigen binding fragment provided herein binds to the same epitope as an anti-IL-23R antibody comprising a VH comprising the amino acid sequence of SEQ ID NO:228, and a VL comprising the amino acid sequence of SEQ ID NO:229. In some embodiments, the antibody or antigen binding fragment provided herein binds to the same epitope as an anti-IL-23R antibody comprising a VH comprising the amino acid sequence of SEQ ID NO:230, and a VL comprising the amino acid sequence of SEQ ID NO:231. In some embodiments, the antibody or antigen binding fragment provided herein binds to the same epitope as an anti-IL-23R antibody comprising a VH comprising the amino acid sequence of SEQ ID NO:232, and a VL comprising the amino acid sequence of SEQ ID NO:233. In some embodiments, the antibody or antigen binding fragment provided herein binds to the same epitope as an anti-IL-23R antibody comprising a VH comprising the amino acid sequence of SEQ ID NO:234, and a VL comprising the amino acid sequence of SEQ ID NO:235. In some embodiments, the antibody or antigen binding fragment provided herein binds to the same epitope as an anti-IL-23R antibody comprising a VH comprising the amino acid sequence of SEQ ID NO:236, and a VL comprising the amino acid sequence of SEQ ID NO:237. In some embodiments, the antibody or antigen binding fragment provided herein binds to the same epitope as an anti-IL-23R antibody comprising a VH comprising the amino acid sequence of SEQ ID NO:238, and a VL comprising the amino acid sequence of SEQ ID NO:239. In some embodiments, the antibody or antigen binding fragment provided herein binds to the same epitope as an anti-IL-23R antibody comprising a VH comprising the amino acid sequence of SEQ ID NO:240, and a VL comprising the amino acid sequence of SEQ ID NO:241. In some embodiments, the antibody or antigen binding fragment provided herein binds to the same epitope as an anti-IL-23R antibody comprising a VH comprising the amino acid sequence of SEQ ID NO:246, and a VL comprising the amino acid sequence of SEQ ID NO:247. In some embodiments, the antibody or antigen binding fragment provided herein binds to the same epitope as an anti-IL-23R antibody comprising a VH comprising the amino acid sequence of SEQ ID NO:248, and a VL comprising the amino acid sequence of SEQ ID NO:249. In some embodiments, the antibody or antigen binding fragment provided herein binds to the same epitope as an anti-IL-23R antibody comprising a VH comprising the amino acid sequence of SEQ ID NO:250, and a VL comprising the amino acid sequence of SEQ ID NO:251. In some embodiments, the antibody or antigen binding fragment provided herein binds to the same epitope as an anti-IL-23R antibody comprising a VH comprising the amino acid sequence of SEQ ID NO:252, and a VL comprising the amino acid sequence of SEQ ID NO:253. In some embodiments, the antibody or antigen binding fragment provided herein binds to the same epitope as an anti-IL-23R antibody comprising a VH comprising the amino acid sequence of SEQ ID NO:254, and a VL comprising the amino acid sequence of SEQ ID NO:255. In some embodiments, the antibody or antigen binding fragment provided herein binds to the same epitope as an anti-IL-23R antibody comprising a VH comprising the amino acid sequence of SEQ ID NO:256, and a VL comprising the amino acid sequence of SEQ ID NO:257. In some embodiments, the antibody or antigen binding fragment provided herein binds to the same epitope as an anti-IL-23R antibody comprising a VH comprising the amino acid sequence of SEQ ID NO:258, and a VL comprising the amino acid sequence of SEQ ID NO:259. In some embodiments, the antibody or antigen binding fragment provided herein binds to the same epitope as an anti-IL-23R antibody comprising a VH comprising the amino acid sequence of SEQ ID NO:260, and a VL comprising the amino acid sequence of SEQ ID NO:261. In some embodiments, the antibody or antigen binding fragment provided herein binds to the same epitope as an anti-IL-23R antibody comprising a VH comprising the amino acid sequence of SEQ ID NO:262, and a VL comprising the amino acid sequence of SEQ ID NO:263. In some embodiments, the antibody or antigen binding fragment provided herein binds to the same epitope as an anti-IL-23R antibody comprising a VH comprising the amino acid sequence of SEQ ID NO:264, and a VL comprising the amino acid sequence of SEQ ID NO:265. In some embodiments, the antibody or antigen binding fragment provided herein binds to the same epitope as an anti-IL-23R antibody comprising a VH comprising the amino acid sequence of SEQ ID NO:268, and a VL comprising the amino acid sequence of SEQ ID NO:269. In some embodiments, the antibody or antigen binding fragment provided herein binds to the same epitope as an anti-IL-23R antibody comprising a VH comprising the amino acid sequence of SEQ ID NO:786, and a VL comprising the amino acid sequence of SEQ ID NO:787. In some embodiments, the antibody or antigen binding fragment provided herein binds to the same epitope as an anti-IL-23R antibody comprising a VH comprising the amino acid sequence of SEQ ID NO:788, and a VL comprising the amino acid sequence of SEQ ID NO:789. In some embodiments, the antibody or antigen binding fragment provided herein binds to the same epitope as an anti-IL-23R antibody comprising a VH comprising the amino acid sequence of SEQ ID NO:790, and a VL comprising the amino acid sequence of SEQ ID NO:791. In some embodiments, the antibody or antigen binding fragment provided herein binds to the same epitope as an anti-IL-23R antibody comprising a VH comprising the amino acid sequence of SEQ ID NO:792, and a VL comprising the amino acid sequence of SEQ ID NO:793. In some embodiments, the antibody or antigen binding fragment provided herein binds to the same epitope as an anti-IL-23R antibody comprising a VH comprising the amino acid sequence of SEQ ID NO:798, and a VL comprising the amino acid sequence of SEQ ID NO:799. In some embodiments, the antibody or antigen binding fragment provided herein binds to the same epitope as an anti-IL-23R antibody comprising a VH comprising the amino acid sequence of SEQ ID NO:806, and a VL comprising the amino acid sequence of SEQ ID NO:807. In some embodiments, the antibody or antigen binding fragment provided herein binds to the same epitope as an anti-IL-23R antibody comprising a VH comprising the amino acid sequence of SEQ ID NO:808, and a VL comprising the amino acid sequence of SEQ ID NO:809. In some embodiments, the antibody or antigen binding fragment provided herein binds to the same epitope as an anti-IL-23R antibody comprising a VH comprising the amino acid sequence of SEQ ID NO:810, and a VL comprising the amino acid sequence of SEQ ID NO:811. In some embodiments, the antibody or antigen binding fragment provided herein binds to the same epitope as an anti-IL-23R antibody comprising a VH comprising the amino acid sequence of SEQ ID NO:812, and a VL comprising the amino acid sequence of SEQ ID NO:813. In some embodiments, the antibody or antigen binding fragment provided herein binds to the same epitope as an anti-IL-23R antibody comprising a VH comprising the amino acid sequence of SEQ ID NO:814, and a VL comprising the amino acid sequence of SEQ ID NO:815. In some embodiments, the antibody or antigen binding fragment provided herein binds to the same epitope as an anti-IL-23R antibody comprising a VH comprising the amino acid sequence of SEQ ID NO:816, and a VL comprising the amino acid sequence of SEQ ID NO:817. In some embodiments, the antibody or antigen binding fragment provided herein binds to the same epitope as an anti-IL-23R antibody comprising a VH comprising the amino acid sequence of SEQ ID NO:818, and a VL comprising the amino acid sequence of SEQ ID NO:819. In some embodiments, the antibody or antigen binding fragment provided herein binds to the same epitope as an anti-IL-23R antibody comprising a VH comprising the amino acid sequence of SEQ ID NO:820, and a VL comprising the amino acid sequence of SEQ ID NO:821. In some embodiments, the antibody or antigen binding fragment provided herein binds to the same epitope as an anti-IL-23R antibody comprising a VH comprising the amino acid sequence of SEQ ID NO:822, and a VL comprising the amino acid sequence of SEQ ID NO:823. In some embodiments, the antibody or antigen binding fragment provided herein binds to the same epitope as an anti-IL-23R antibody comprising a VH comprising the amino acid sequence of SEQ ID NO:824, and a VL comprising the amino acid sequence of SEQ ID NO:825. In some embodiments, the antibody or antigen binding fragment provided herein binds to the same epitope as an anti-IL-23R antibody comprising a VH comprising the amino acid sequence of SEQ ID NO:826, and a VL comprising the amino acid sequence of SEQ ID NO:827. In some embodiments, the antibody or antigen binding fragment provided herein binds to the same epitope as an anti-IL-23R antibody comprising a VH comprising the amino acid sequence of SEQ ID NO:828, and a VL comprising the amino acid sequence of SEQ ID NO:829. In some embodiments, the antibody or antigen binding fragment provided herein binds to the same epitope as an anti-IL-23R antibody comprising a VH comprising the amino acid sequence of SEQ ID NO:830, and a VL comprising the amino acid sequence of SEQ ID NO:831. In some embodiments, the antibody or antigen binding fragment provided herein binds to the same epitope as an anti-IL-23R antibody comprising a VH comprising the amino acid sequence of SEQ ID NO:832, and a VL comprising the amino acid sequence of SEQ ID NO:833. In some embodiments, the antibody or antigen binding fragment provided herein binds to the same epitope as an anti-IL-23R antibody comprising a VH comprising the amino acid sequence of SEQ ID NO:836, and a VL comprising the amino acid sequence of SEQ ID NO:837. In some embodiments, the antibody or antigen binding fragment provided herein binds to the same epitope as an anti-IL-23R antibody comprising a VH comprising the amino acid sequence of SEQ ID NO:838, and a VL comprising the amino acid sequence of SEQ ID NO:839. In some embodiments, the antibody or antigen binding fragment provided herein binds to the same epitope as an anti-IL-23R antibody comprising a VH comprising the amino acid sequence of SEQ ID NO:840, and a VL comprising the amino acid sequence of SEQ ID NO:841. In some embodiments, the antibody or antigen binding fragment provided herein binds to the same epitope as an anti-IL-23R antibody comprising a VH comprising the amino acid sequence of SEQ ID NO: 842, and a VL comprising the amino acid sequence of SEQ ID NO:843. In some embodiments, the antibody or antigen binding fragment provided herein binds to the same epitope as an anti-IL-23R antibody comprising a VH comprising the amino acid sequence of SEQ ID NO:846, and a VL comprising the amino acid sequence of SEQ ID NO:847. In some embodiments, the antibody or antigen binding fragment provided herein binds to the same epitope as an anti-IL-23R antibody comprising a VH comprising the amino acid sequence of SEQ ID NO:848, and a VL comprising the amino acid sequence of SEQ ID NO:849. In some embodiments, the antibody or antigen binding fragment provided herein binds to the same epitope as an anti-IL-23R antibody comprising a VH comprising the amino acid sequence of SEQ ID NO:850, and a VL comprising the amino acid sequence of SEQ ID NO:851. In some embodiments, the antibody or antigen binding fragment provided herein binds to the same epitope as an anti-IL-23R antibody comprising a VH comprising the amino acid sequence of SEQ ID NO:852, and a VL comprising the amino acid sequence of SEQ ID NO:853. In some embodiments, the antibody or antigen binding fragment provided herein binds to the same epitope as an anti-IL-23R antibody comprising a VH comprising the amino acid sequence of SEQ ID NO:854, and a VL comprising the amino acid sequence of SEQ ID NO:855. In some embodiments, the antibody or antigen binding fragment provided herein binds to the same epitope as an anti-IL-23R antibody comprising a VH comprising the amino acid sequence of SEQ ID NO:856, and a VL comprising the amino acid sequence of SEQ ID NO:857. In some embodiments, the antibody or antigen binding fragment provided herein binds to the same epitope as an anti-IL-23R antibody comprising a VH comprising the amino acid sequence of SEQ ID NO:858, and a VL comprising the amino acid sequence of SEQ ID NO:859. In some embodiments, the antibody or antigen binding fragment provided herein binds to the same epitope as an anti-IL-23R antibody comprising a VH comprising the amino acid sequence of SEQ ID NO:860, and a VL comprising the amino acid sequence of SEQ ID NO:861. In some embodiments, the antibody or antigen binding fragment provided herein binds to the same epitope as an anti-IL-23R antibody comprising a VH comprising the amino acid sequence of SEQ ID NO:862, and a VL comprising the amino acid sequence of SEQ ID NO:863. In some embodiments, the antibody or antigen binding fragment provided herein binds to the same epitope as an anti-IL-23R antibody comprising a VH comprising the amino acid sequence of SEQ ID NO:864, and a VL comprising the amino acid sequence of SEQ ID NO:865. In some embodiments, the antibody or antigen binding fragment provided herein binds to the same epitope as an anti-IL-23R antibody comprising a VH comprising the amino acid sequence of SEQ ID NO:866, and a VL comprising the amino acid sequence of SEQ ID NO:867. In some embodiments, the antibody or antigen binding fragment provided herein binds to the same epitope as an anti-IL-23R antibody comprising a VH comprising the amino acid sequence of SEQ ID NO:868, and a VL comprising the amino acid sequence of SEQ ID NO:869. In some embodiments, the antibody or antigen binding fragment provided herein binds to the same epitope as an anti-IL-23R antibody comprising a VH comprising the amino acid sequence of SEQ ID NO:870, and a VL comprising the amino acid sequence of SEQ ID NO:871. In some embodiments, the antibody or antigen binding fragment provided herein binds to the same epitope as an anti-IL-23R antibody comprising a VH comprising the amino acid sequence of SEQ ID NO:872, and a VL comprising the amino acid sequence of SEQ ID NO:873. In some embodiments, the antibody or antigen binding fragment provided herein binds to the same epitope as an anti-IL-23R antibody comprising a VH comprising the amino acid sequence of SEQ ID NO:874, and a VL comprising the amino acid sequence of SEQ ID NO:875. In some embodiments, the antibody or antigen binding fragment provided herein binds to the same epitope as an anti-IL-23R antibody comprising a VH comprising the amino acid sequence of SEQ ID NO:876, and a VL comprising the amino acid sequence of SEQ ID NO:877. In some embodiments, the antibody or antigen binding fragment provided herein binds to the same epitope as an anti-IL-23R antibody comprising a VH comprising the amino acid sequence of SEQ ID NO:878, and a VL comprising the amino acid sequence of SEQ ID NO:879. In some embodiments, the antibody or antigen binding fragment provided herein binds to the same epitope as an anti-IL-23R antibody comprising a VH comprising the amino acid sequence of SEQ ID NO:880, and a VL comprising the amino acid sequence of SEQ ID NO:881. In some embodiments, the antibody or antigen binding fragment provided herein binds to the same epitope as an anti-IL-23R antibody comprising a VH comprising the amino acid sequence of SEQ ID NO:882, and a VL comprising the amino acid sequence of SEQ ID NO:883. In some embodiments, the antibody or antigen binding fragment provided herein binds to the same epitope as an anti-IL-23R antibody comprising a VH comprising the amino acid sequence of SEQ ID NO:884, and a VL comprising the amino acid sequence of SEQ ID NO:885. In some embodiments, the antibody or antigen binding fragment provided herein binds to the same epitope as an anti-IL-23R antibody comprising a VH comprising the amino acid sequence of SEQ ID NO:886, and a VL comprising the amino acid sequence of SEQ ID NO:887. In some embodiments, the antibody or antigen binding fragment provided herein binds to the same epitope as an anti-IL-23R antibody comprising a VH comprising the amino acid sequence of SEQ ID NO:888, and a VL comprising the amino acid sequence of SEQ ID NO:889. In some embodiments, the antibody or antigen binding fragment provided herein binds to the same epitope as an anti-IL-23R antibody comprising a VH comprising the amino acid sequence of SEQ ID NO:890, and a VL comprising the amino acid sequence of SEQ ID NO:891.

[0706] In some embodiments, provided herein is an anti-IL-23R antibody, or antigen binding fragment thereof, that specifically binds to IL-23R competitively with any one of the anti-IL-23R antibodies described herein. In some embodiments, the antibody or antigen binding fragment provided herein specifically binds to IL-23R competitively with an anti-IL-23R antibody comprising a VH comprising the amino acid sequence of SEQ ID NO:138, and a VL comprising the amino acid sequence of SEQ ID NO:139. In some embodiments, the antibody or antigen binding fragment provided herein specifically binds to IL-23R competitively with an anti-IL-23R antibody comprising a VH comprising the amino acid sequence of SEQ ID NO: 142, and a VL comprising the amino acid sequence of SEQ ID NO:143. In some embodiments, the antibody or antigen binding fragment provided herein specifically binds to IL-23R competitively with an anti-IL-23R antibody comprising a VH comprising the amino acid sequence of SEQ ID NO: 144, and a VL comprising the amino acid sequence of SEQ ID NO:145. In some embodiments, the antibody or antigen binding fragment provided herein specifically binds to IL-23R competitively with an anti-IL-23R antibody comprising a VH comprising the amino acid sequence of SEQ ID NO: 148, and a VL comprising the amino acid sequence of SEQ ID NO:149. In some embodiments, the antibody or antigen binding fragment provided herein specifically binds to IL-23R competitively with an anti-IL-23R antibody comprising a VH comprising the amino acid sequence of SEQ ID NO: 150, and a VL comprising the amino acid sequence of SEQ ID NO:151. In some embodiments, the antibody or antigen binding fragment provided herein specifically binds to IL-23R competitively with an anti-IL-23R antibody comprising a VH comprising the amino acid sequence of SEQ ID NO: 152, and a VL comprising the amino acid sequence of SEQ ID NO:153. In some embodiments, the antibody or antigen binding fragment provided herein specifically binds to IL-23R competitively with an anti-IL-23R antibody comprising a VH comprising the amino acid sequence of SEQ ID NO: 154, and a VL comprising the amino acid sequence of SEQ ID NO:155. In some embodiments, the antibody or antigen binding fragment provided herein specifically binds to IL-23R competitively with an anti-IL-23R antibody comprising a VH comprising the amino acid sequence of SEQ ID NO: 156, and a VL comprising the amino acid sequence of SEQ ID NO:157. In some embodiments, the antibody or antigen binding fragment provided herein specifically binds to IL-23R competitively with an anti-IL-23R antibody comprising a VH comprising the amino acid sequence of SEQ ID NO: 158, and a VL comprising the amino acid sequence of SEQ ID NO:159. In some embodiments, the antibody or antigen binding fragment provided herein specifically binds to IL-23R competitively with an anti-IL-23R antibody comprising a VH comprising the amino acid sequence of SEQ ID NO: 160, and a VL comprising the amino acid sequence of SEQ ID NO:161. In some embodiments, the antibody or antigen binding fragment provided herein specifically binds to IL-23R competitively with an anti-IL-23R antibody comprising a VH comprising the amino acid sequence of SEQ ID NO: 162, and a VL comprising the amino acid sequence of SEQ ID NO:163. In some embodiments, the antibody or antigen binding fragment provided herein specifically binds to IL-23R competitively with an anti-IL-23R antibody comprising a VH comprising the amino acid sequence of SEQ ID NO: 164, and a VL comprising the amino acid sequence of SEQ ID NO:165. In some embodiments, the antibody or antigen binding fragment provided herein specifically binds to IL-23R competitively with an anti-IL-23R antibody comprising a VH comprising the amino acid sequence of SEQ ID NO: 166, and a VL comprising the amino acid sequence of SEQ ID NO:167. In some embodiments, the antibody or antigen binding fragment provided herein specifically binds to IL-23R competitively with an anti-IL-23R antibody comprising a VH comprising the amino acid sequence of SEQ ID NO: 168, and a VL comprising the amino acid sequence of SEQ ID NO:169. In some embodiments, the antibody or antigen binding fragment provided herein specifically binds to IL-23R competitively with an anti-IL-23R antibody comprising a VH comprising the amino acid sequence of SEQ ID NO: 170, and a VL comprising the amino acid sequence of SEQ ID NO:171. In some embodiments, the antibody or antigen binding fragment provided herein specifically binds to IL-23R competitively with an anti-IL-23R antibody comprising a VH comprising the amino acid sequence of SEQ ID NO: 172, and a VL comprising the amino acid sequence of SEQ ID NO:173. In some embodiments, the antibody or antigen binding fragment provided herein specifically binds to IL-23R competitively with an anti-IL-23R antibody comprising a VH comprising the amino acid sequence of SEQ ID NO: 174, and a VL comprising the amino acid sequence of SEQ ID NO:175. In some embodiments, the antibody or antigen binding fragment provided herein specifically binds to IL-23R competitively with an anti-IL-23R antibody comprising a VH comprising the amino acid sequence of SEQ ID NO: 176, and a VL comprising the amino acid sequence of SEQ ID NO:177. In some embodiments, the antibody or antigen binding fragment provided herein specifically binds to IL-23R competitively with an anti-IL-23R antibody comprising a VH comprising the amino acid sequence of SEQ ID NO: 178, and a VL comprising the amino acid sequence of SEQ ID NO:179. In some embodiments, the antibody or antigen binding fragment provided herein specifically binds to IL-23R competitively with an anti-IL-23R antibody comprising a VH comprising the amino acid sequence of SEQ ID NO: 180, and a VL comprising the amino acid sequence of SEQ ID NO:181. In some embodiments, the antibody or antigen binding fragment provided herein specifically binds to IL-23R competitively with an anti-IL-23R antibody comprising a VH comprising the amino acid sequence of SEQ ID NO: 182, and a VL comprising the amino acid sequence of SEQ ID NO:183. In some embodiments, the antibody or antigen binding fragment provided herein specifically binds to IL-23R competitively with an anti-IL-23R antibody comprising a VH comprising the amino acid sequence of SEQ ID NO: 186, and a VL comprising the amino acid sequence of SEQ ID NO:187. In some embodiments, the antibody or antigen binding fragment provided herein specifically binds to IL-23R competitively with an anti-IL-23R antibody comprising a VH comprising the amino acid sequence of SEQ ID NO: 188, and a VL comprising the amino acid sequence of SEQ ID NO:189. In some embodiments, the antibody or antigen binding fragment provided herein specifically binds to IL-23R competitively with an anti-IL-23R antibody comprising a VH comprising the amino acid sequence of SEQ ID NO: 190, and a VL comprising the amino acid sequence of SEQ ID NO:191. In some embodiments, the antibody or antigen binding fragment provided herein specifically binds to IL-23R competitively with an anti-IL-23R antibody comprising a VH comprising the amino acid sequence of SEQ ID NO: 192, and a VL comprising the amino acid sequence of SEQ ID NO:193. In some embodiments, the antibody or antigen binding fragment provided herein specifically binds to IL-23R competitively with an anti-IL-23R antibody comprising a VH comprising the amino acid sequence of SEQ ID NO: 194, and a VL comprising the amino acid sequence of SEQ ID NO:195. In some embodiments, the antibody or antigen binding fragment provided herein specifically binds to IL-23R competitively with an anti-IL-23R antibody comprising a VH comprising the amino acid sequence of SEQ ID NO: 196, and a VL comprising the amino acid sequence of SEQ ID NO:197. In some embodiments, the antibody or antigen binding fragment provided herein specifically binds to IL-23R competitively with an anti-IL-23R antibody comprising a VH comprising the amino acid sequence of SEQ ID NO: 198, and a VL comprising the amino acid sequence of SEQ ID NO:199. In some embodiments, the antibody or antigen binding fragment provided herein specifically binds to IL-23R competitively with an anti-IL-23R antibody comprising a VH comprising the amino acid sequence of SEQ ID NO:200, and a VL comprising the amino acid sequence of SEQ ID NO:201. In some embodiments, the antibody or antigen binding fragment provided herein specifically binds to IL-23R competitively with an anti-IL-23R antibody comprising a VH comprising the amino acid sequence of SEQ ID NO:202, and a VL comprising the amino acid sequence of SEQ ID NO:203. In some embodiments, the antibody or antigen binding fragment provided herein specifically binds to IL-23R competitively with an anti-IL-23R antibody comprising a VH comprising the amino acid sequence of SEQ ID NO:204, and a VL comprising the amino acid sequence of SEQ ID NO:205. In some embodiments, the antibody or antigen binding fragment provided herein specifically binds to IL-23R competitively with an anti-IL-23R antibody comprising a VH comprising the amino acid sequence of SEQ ID NO:206, and a VL comprising the amino acid sequence of SEQ ID NO:207. In some embodiments, the antibody or antigen binding fragment provided herein specifically binds to IL-23R competitively with an anti-IL-23R antibody comprising a VH comprising the amino acid sequence of SEQ ID NO:208, and a VL comprising the amino acid sequence of SEQ ID NO:209. In some embodiments, the antibody or antigen binding fragment provided herein specifically binds to IL-23R competitively with an anti-IL-23R antibody comprising a VH comprising the amino acid sequence of SEQ ID NO:210, and a VL comprising the amino acid sequence of SEQ ID NO:211. In some embodiments, the antibody or antigen binding fragment provided herein specifically binds to IL-23R competitively with an anti-IL-23R antibody comprising a VH comprising the amino acid sequence of SEQ ID NO:212, and a VL comprising the amino acid sequence of SEQ ID NO:213. In some embodiments, the antibody or antigen binding fragment provided herein specifically binds to IL-23R competitively with an anti-IL-23R antibody comprising a VH comprising the amino acid sequence of SEQ ID NO:214, and a VL comprising the amino acid sequence of SEQ ID NO:215. In some embodiments, the antibody or antigen binding fragment provided herein specifically binds to IL-23R competitively with an anti-IL-23R antibody comprising a VH comprising the amino acid sequence of SEQ ID NO:216, and a VL comprising the amino acid sequence of SEQ ID NO:217. In some embodiments, the antibody or antigen binding fragment provided herein specifically binds to IL-23R competitively with an anti-IL-23R antibody comprising a VH comprising the amino acid sequence of SEQ ID NO:218, and a VL comprising the amino acid sequence of SEQ ID NO:219. In some embodiments, the antibody or antigen binding fragment provided herein specifically binds to IL-23R competitively with an anti-IL-23R antibody comprising a VH comprising the amino acid sequence of SEQ ID NO:220, and a VL comprising the amino acid sequence of SEQ ID NO:221. In some embodiments, the antibody or antigen binding fragment provided herein specifically binds to IL-23R competitively with an anti-IL-23R antibody comprising a VH comprising the amino acid sequence of SEQ ID NO:222, and a VL comprising the amino acid sequence of SEQ ID NO:223. In some embodiments, the antibody or antigen binding fragment provided herein specifically binds to IL-23R competitively with an anti-IL-23R antibody comprising a VH comprising the amino acid sequence of SEQ ID NO:226, and a VL comprising the amino acid sequence of SEQ ID NO:227. In some embodiments, the antibody or antigen binding fragment provided herein specifically binds to IL-23R competitively with an anti-IL-23R antibody comprising a VH comprising the amino acid sequence of SEQ ID NO:228, and a VL comprising the amino acid sequence of SEQ ID NO:229. In some embodiments, the antibody or antigen binding fragment provided herein specifically binds to IL-23R competitively with an anti-IL-23R antibody comprising a VH comprising the amino acid sequence of SEQ ID NO:230, and a VL comprising the amino acid sequence of SEQ ID NO:231. In some embodiments, the antibody or antigen binding fragment provided herein specifically binds to IL-23R competitively with an anti-IL-23R antibody comprising a VH comprising the amino acid sequence of SEQ ID NO:232, and a VL comprising the amino acid sequence of SEQ ID NO:233. In some embodiments, the antibody or antigen binding fragment provided herein specifically binds to IL-23R competitively with an anti-IL-23R antibody comprising a VH comprising the amino acid sequence of SEQ ID NO:234, and a VL comprising the amino acid sequence of SEQ ID NO:235. In some embodiments, the antibody or antigen binding fragment provided herein specifically binds to IL-23R competitively with an anti-IL-23R antibody comprising a VH comprising the amino acid sequence of SEQ ID NO:236, and a VL comprising the amino acid sequence of SEQ ID NO:237. In some embodiments, the antibody or antigen binding fragment provided herein specifically binds to IL-23R competitively with an anti-IL-23R antibody comprising a VH comprising the amino acid sequence of SEQ ID NO:238, and a VL comprising the amino acid sequence of SEQ ID NO:239. In some embodiments, the antibody or antigen binding fragment provided herein specifically binds to IL-23R competitively with an anti-IL-23R antibody comprising a VH comprising the amino acid sequence of SEQ ID NO:240, and a VL comprising the amino acid sequence of SEQ ID NO:241. In some embodiments, the antibody or antigen binding fragment provided herein specifically binds to IL-23R competitively with an anti-IL-23R antibody comprising a VH comprising the amino acid sequence of SEQ ID NO:246, and a VL comprising the amino acid sequence of SEQ ID NO:247. In some embodiments, the antibody or antigen binding fragment provided herein specifically binds to IL-23R competitively with an anti-IL-23R antibody comprising a VH comprising the amino acid sequence of SEQ ID NO:248, and a VL comprising the amino acid sequence of SEQ ID NO:249. In some embodiments, the antibody or antigen binding fragment provided herein specifically binds to IL-23R competitively with an anti-IL-23R antibody comprising a VH comprising the amino acid sequence of SEQ ID NO:250, and a VL comprising the amino acid sequence of SEQ ID NO:251. In some embodiments, the antibody or antigen binding fragment provided herein specifically binds to IL-23R competitively with an anti-IL-23R antibody comprising a VH comprising the amino acid sequence of SEQ ID NO:252, and a VL comprising the amino acid sequence of SEQ ID NO:253. In some embodiments, the antibody or antigen binding fragment provided herein specifically binds to IL-23R competitively with an anti-IL-23R antibody comprising a VH comprising the amino acid sequence of SEQ ID NO:254, and a VL comprising the amino acid sequence of SEQ ID NO:255. In some embodiments, the antibody or antigen binding fragment provided herein specifically binds to IL-23R competitively with an anti-IL-23R antibody comprising a VH comprising the amino acid sequence of SEQ ID NO:256, and a VL comprising the amino acid sequence of SEQ ID NO:257. In some embodiments, the antibody or antigen binding fragment provided herein specifically binds to IL-23R competitively with an anti-IL-23R antibody comprising a VH comprising the amino acid sequence of SEQ ID NO:258, and a VL comprising the amino acid sequence of SEQ ID NO:259. In some embodiments, the antibody or antigen binding fragment provided herein specifically binds to IL-23R competitively with an anti-IL-23R antibody comprising a VH comprising the amino acid sequence of SEQ ID NO:260, and a VL comprising the amino acid sequence of SEQ ID NO:261. In some embodiments, the antibody or antigen binding fragment provided herein specifically binds to IL-23R competitively with an anti-IL-23R antibody comprising a VH comprising the amino acid sequence of SEQ ID NO:262, and a LCDR1, an LCDR2, and an LCDR3 as set forth in SEQ ID NO:263. In some embodiments, the antibody or antigen binding fragment provided herein specifically binds to IL-23R competitively with an anti-IL-23R antibody comprising a VH comprising the amino acid sequence of SEQ ID NO:264, and a VL comprising the amino acid sequence of SEQ ID NO:265. In some embodiments, the antibody or antigen binding fragment provided herein specifically binds to IL-23R competitively with an anti-IL-23R antibody comprising a VH comprising the amino acid sequence of SEQ ID NO:268, and a VL comprising the amino acid sequence of SEQ ID NO:269. In some embodiments, the antibody or antigen binding fragment provided herein specifically binds to IL-23R competitively with an anti-IL-23R antibody comprising a VH comprising the amino acid sequence of SEQ ID NO:786, and a VL comprising the amino acid sequence of SEQ ID NO:787. In some embodiments, the antibody or antigen binding fragment provided herein specifically binds to IL-23R competitively with an anti-IL-23R antibody comprising a VH comprising the amino acid sequence of SEQ ID NO:788, and a VL comprising the amino acid sequence of SEQ ID NO:789. In some embodiments, the antibody or antigen binding fragment provided herein specifically binds to IL-23R competitively with an anti-IL-23R antibody comprising a VH comprising the amino acid sequence of SEQ ID NO:790, and a VL comprising the amino acid sequence of SEQ ID NO:791. In some embodiments, the antibody or antigen binding fragment provided herein specifically binds to IL-23R competitively with an anti-IL-23R antibody comprising a VH comprising the amino acid sequence of SEQ ID NO:792, and a VL comprising the amino acid sequence of SEQ ID NO:793. In some embodiments, the antibody or antigen binding fragment provided herein specifically binds to IL-23R competitively with an anti-IL-23R antibody comprising a VH comprising the amino acid sequence of SEQ ID NO:798, and a VL comprising the amino acid sequence of SEQ ID NO:799. In some embodiments, the antibody or antigen binding fragment provided herein specifically binds to IL-23R competitively with an anti-IL-23R antibody comprising a VH comprising the amino acid sequence of SEQ ID NO:806, and a VL comprising the amino acid sequence of SEQ ID NO:807. In some embodiments, the antibody or antigen binding fragment provided herein specifically binds to IL-23R competitively with an anti-IL-23R antibody comprising a VH comprising the amino acid sequence of SEQ ID NO:808, and a VL comprising the amino acid sequence of SEQ ID NO:809. In some embodiments, the antibody or antigen binding fragment provided herein specifically binds to IL-23R competitively with an anti-IL-23R antibody comprising a VH comprising the amino acid sequence of SEQ ID NO:810, and a VL comprising the amino acid sequence of SEQ ID NO:811. In some embodiments, the antibody or antigen binding fragment provided herein specifically binds to IL-23R competitively with an anti-IL-23R antibody comprising a VH comprising the amino acid sequence of SEQ ID NO:812, and a VL comprising the amino acid sequence of SEQ ID NO:813. In some embodiments, the antibody or antigen binding fragment provided herein specifically binds to IL-23R competitively with an anti-IL-23R antibody comprising a VH comprising the amino acid sequence of SEQ ID NO:814, and a VL comprising the amino acid sequence of SEQ ID NO:815. In some embodiments, the antibody or antigen binding fragment provided herein specifically binds to IL-23R competitively with an anti-IL-23R antibody comprising a VH comprising the amino acid sequence of SEQ ID NO:816, and a VL comprising the amino acid sequence of SEQ ID NO:817. In some embodiments, the antibody or antigen binding fragment provided herein specifically binds to IL-23R competitively with an anti-IL-23R antibody comprising a VH comprising the amino acid sequence of SEQ ID NO:818, and a VL comprising the amino acid sequence of SEQ ID NO:819. In some embodiments, the antibody or antigen binding fragment provided herein specifically binds to IL-23R competitively with an anti-IL-23R antibody comprising a VH comprising the amino acid sequence of SEQ ID NO:820, and a VL comprising the amino acid sequence of SEQ ID NO:821. In some embodiments, the antibody or antigen binding fragment provided herein specifically binds to IL-23R competitively with an anti-IL-23R antibody comprising a VH comprising the amino acid sequence of SEQ ID NO:822, and a VL comprising the amino acid sequence of SEQ ID NO:823. In some embodiments, the antibody or antigen binding fragment provided herein specifically binds to IL-23R competitively with an anti-IL-23R antibody comprising a VH comprising the amino acid sequence of SEQ ID NO:824, and a VL comprising the amino acid sequence of SEQ ID NO:825. In some embodiments, the antibody or antigen binding fragment provided herein specifically binds to IL-23R competitively with an anti-IL-23R antibody comprising a VH comprising the amino acid sequence of SEQ ID NO:826, and a VL comprising the amino acid sequence of SEQ ID NO:827. In some embodiments, the antibody or antigen binding fragment provided herein specifically binds to IL-23R competitively with an anti-IL-23R antibody comprising a VH comprising the amino acid sequence of SEQ ID NO:828, and a VL comprising the amino acid sequence of SEQ ID NO:829. In some embodiments, the antibody or antigen binding fragment provided herein specifically binds to IL-23R competitively with an anti-IL-23R antibody comprising a VH comprising the amino acid sequence of SEQ ID NO:830, and a VL comprising the amino acid sequence of SEQ ID NO:831. In some embodiments, the antibody or antigen binding fragment provided herein specifically binds to IL-23R competitively with an anti-IL-23R antibody comprising a VH comprising the amino acid sequence of SEQ ID NO:832, and a VL comprising the amino acid sequence of SEQ ID NO:833. In some embodiments, the antibody or antigen binding fragment provided herein specifically binds to IL-23R competitively with an anti-IL-23R antibody comprising a VH comprising the amino acid sequence of SEQ ID NO:836, and a VL comprising the amino acid sequence of SEQ ID NO:837. In some embodiments, the antibody or antigen binding fragment provided herein specifically binds to IL-23R competitively with an anti-IL-23R antibody comprising a VH comprising the amino acid sequence of SEQ ID NO:838, and a VL comprising the amino acid sequence of SEQ ID NO:839. In some embodiments, the antibody or antigen binding fragment provided herein specifically binds to IL-23R competitively with an anti-IL-23R antibody comprising a VH comprising the amino acid sequence of SEQ ID NO:840, and a VL comprising the amino acid sequence of SEQ ID NO:841. In some embodiments, the antibody or antigen binding fragment provided herein specifically binds to IL-23R competitively with an anti-IL-23R antibody comprising a VH comprising the amino acid sequence of SEQ ID NO: 842, and a VL comprising the amino acid sequence of SEQ ID NO:843. In some embodiments, the antibody or antigen binding fragment provided herein specifically binds to IL-23R competitively with an anti-IL-23R antibody comprising a VH comprising the amino acid sequence of SEQ ID NO:846, and a VL comprising the amino acid sequence of SEQ ID NO:847. In some embodiments, the antibody or antigen binding fragment provided herein specifically binds to IL-23R competitively with an anti-IL-23R antibody comprising a VH comprising the amino acid sequence of SEQ ID NO:848, and a VL comprising the amino acid sequence of SEQ ID NO:849. In some embodiments, the antibody or antigen binding fragment provided herein specifically binds to IL-23R competitively with an anti-IL-23R antibody comprising a VH comprising the amino acid sequence of SEQ ID NO:850, and a VL comprising the amino acid sequence of SEQ ID NO:851. In some embodiments, the antibody or antigen binding fragment provided herein specifically binds to IL-23R competitively with an anti-IL-23R antibody comprising a VH comprising the amino acid sequence of SEQ ID NO:852, and a VL comprising the amino acid sequence of SEQ ID NO:853. In some embodiments, the antibody or antigen binding fragment provided herein specifically binds to IL-23R competitively with an anti-IL-23R antibody comprising a VH comprising the amino acid sequence of SEQ ID NO:854, and a VL comprising the amino acid sequence of SEQ ID NO:855. In some embodiments, the antibody or antigen binding fragment provided herein specifically binds to IL-23R competitively with an anti-IL-23R antibody comprising a VH comprising the amino acid sequence of SEQ ID NO:856, and a VL comprising the amino acid sequence of SEQ ID NO:857. In some embodiments, the antibody or antigen binding fragment provided herein specifically binds to IL-23R competitively with an anti-IL-23R antibody comprising a VH comprising the amino acid sequence of SEQ ID NO:858, and a VL comprising the amino acid sequence of SEQ ID NO:859. In some embodiments, the antibody or antigen binding fragment provided herein specifically binds to IL-23R competitively with an anti-IL-23R antibody comprising a VH comprising the amino acid sequence of SEQ ID NO:860, and a VL comprising the amino acid sequence of SEQ ID NO:861. In some embodiments, the antibody or antigen binding fragment provided herein specifically binds to IL-23R competitively with an anti-IL-23R antibody comprising a VH comprising the amino acid sequence of SEQ ID NO:862, and a VL comprising the amino acid sequence of SEQ ID NO:863. In some embodiments, the antibody or antigen binding fragment provided herein specifically binds to IL-23R competitively with an anti-IL-23R antibody comprising a VH comprising the amino acid sequence of SEQ ID NO:864, and a VL comprising the amino acid sequence of SEQ ID NO:865. In some embodiments, the antibody or antigen binding fragment provided herein specifically binds to IL-23R competitively with an anti-IL-23R antibody comprising a VH comprising the amino acid sequence of SEQ ID NO:866, and a VL comprising the amino acid sequence of SEQ ID NO:867. In some embodiments, the antibody or antigen binding fragment provided herein specifically binds to IL-23R competitively with an anti-IL-23R antibody comprising a VH comprising the amino acid sequence of SEQ ID NO:868, and a VL comprising the amino acid sequence of SEQ ID NO:869. In some embodiments, the antibody or antigen binding fragment provided herein specifically binds to IL-23R competitively with an anti-IL-23R antibody comprising a VH comprising the amino acid sequence of SEQ ID NO:870, and a VL comprising the amino acid sequence of SEQ ID NO:871. In some embodiments, the antibody or antigen binding fragment provided herein specifically binds to IL-23R competitively with an anti-IL-23R antibody comprising a VH comprising the amino acid sequence of SEQ ID NO:872, and a VL comprising the amino acid sequence of SEQ ID NO:873. In some embodiments, the antibody or antigen binding fragment provided herein specifically binds to IL-23R competitively with an anti-IL-23R antibody comprising a VH comprising the amino acid sequence of SEQ ID NO:874, and a VL comprising the amino acid sequence of SEQ ID NO:875. In some embodiments, the antibody or antigen binding fragment provided herein specifically binds to IL-23R competitively with an anti-IL-23R antibody comprising a VH comprising the amino acid sequence of SEQ ID NO:876, and a VL comprising the amino acid sequence of SEQ ID NO:877. In some embodiments, the antibody or antigen binding fragment provided herein specifically binds to IL-23R competitively with an anti-IL-23R antibody comprising a VH comprising the amino acid sequence of SEQ ID NO:878, and a VL comprising the amino acid sequence of SEQ ID NO:879. In some embodiments, the antibody or antigen binding fragment provided herein specifically binds to IL-23R competitively with an anti-IL-23R antibody comprising a VH comprising the amino acid sequence of SEQ ID NO:880, and a VL comprising the amino acid sequence of SEQ ID NO:881. In some embodiments, the antibody or antigen binding fragment provided herein specifically binds to IL-23R competitively with an anti-IL-23R antibody comprising a VH comprising the amino acid sequence of SEQ ID NO:882, and a VL comprising the amino acid sequence of SEQ ID NO:883. In some embodiments, the antibody or antigen binding fragment provided herein specifically binds to IL-23R competitively with an anti-IL-23R antibody comprising a VH comprising the amino acid sequence of SEQ ID NO:884, and a VL comprising the amino acid sequence of SEQ ID NO:885. In some embodiments, the antibody or antigen binding fragment provided herein specifically binds to IL-23R competitively with an anti-IL-23R antibody comprising a VH comprising the amino acid sequence of SEQ ID NO:886, and a VL comprising the amino acid sequence of SEQ ID NO:887. In some embodiments, the antibody or antigen binding fragment provided herein specifically binds to IL-23R competitively with an anti-IL-23R antibody comprising a VH comprising the amino acid sequence of SEQ ID NO:888, and a VL comprising the amino acid sequence of SEQ ID NO:889. In some embodiments, the antibody or antigen binding fragment provided herein specifically binds to IL-23R competitively with an anti-IL-23R antibody comprising a VH comprising the amino acid sequence of SEQ ID NO:890, and a VL comprising the amino acid sequence of SEQ ID NO:891.

[0707] In some embodiments, the antibody comprises a heavy chain comprising the amino acid sequence of SEQ ID NO:4 and a light chain comprising the amino acid sequence of SEQ ID NO:5. In some embodiments, the antibody comprises a heavy chain comprising the amino acid sequence of SEQ ID NO:8 and a light chain comprising the amino acid sequence of SEQ ID NO:9. In some embodiments, the antibody comprises a heavy chain comprising the amino acid sequence of SEQ ID NO:10 and a light chain comprising the amino acid sequence of SEQ ID NO:11. In some embodiments, the antibody comprises a heavy chain comprising the amino acid sequence of SEQ ID NO:14 and a light chain comprising the amino acid sequence of SEQ ID NO:15. In some embodiments, the antibody comprises a heavy chain comprising the amino acid sequence of SEQ ID NO:16 and a light chain comprising the amino acid sequence of SEQ ID NO:17. In some embodiments, the antibody comprises a heavy chain comprising the amino acid sequence of SEQ ID NO:18 and a light chain comprising the amino acid sequence of SEQ ID NO:19. In some embodiments, the antibody comprises a heavy chain comprising the amino acid sequence of SEQ ID NO:20 and a light chain comprising the amino acid sequence of SEQ ID NO:21. In some embodiments, the antibody comprises a heavy chain comprising the amino acid sequence of SEQ ID NO:22 and a light chain comprising the amino acid sequence of SEQ ID NO:23. In some embodiments, the antibody comprises a heavy chain comprising the amino acid sequence of SEQ ID NO:24 and a light chain comprising the amino acid sequence of SEQ ID NO:25. In some embodiments, the antibody comprises a heavy chain comprising the amino acid sequence of SEQ ID NO:26 and a light chain comprising the amino acid sequence of SEQ ID NO:27. In some embodiments, the antibody comprises a heavy chain comprising the amino acid sequence of SEQ ID NO:28 and a light chain comprising the amino acid sequence of SEQ ID NO:29. In some embodiments, the antibody comprises a heavy chain comprising the amino acid sequence of SEQ ID NO:30 and a light chain comprising the amino acid sequence of SEQ ID NO:31. In some embodiments, the antibody comprises a heavy chain comprising the amino acid sequence of SEQ ID NO:32 and a light chain comprising the amino acid sequence of SEQ ID NO:33. In some embodiments, the antibody comprises a heavy chain comprising the amino acid sequence of SEQ ID NO:34 and a light chain comprising the amino acid sequence of SEQ ID NO:35. In some embodiments, the antibody comprises a heavy chain comprising the amino acid sequence of SEQ ID NO:36 and a light chain comprising the amino acid sequence of SEQ ID NO:37. In some embodiments, the antibody comprises a heavy chain comprising the amino acid sequence of SEQ ID NO:38 and a light chain comprising the amino acid sequence of SEQ ID NO:39. In some embodiments, the antibody comprises a heavy chain comprising the amino acid sequence of SEQ ID NO:40 and a light chain comprising the amino acid sequence of SEQ ID NO:41. In some embodiments, the antibody comprises a heavy chain comprising the amino acid sequence of SEQ ID NO:42 and a light chain comprising the amino acid sequence of SEQ ID NO:43. In some embodiments, the antibody comprises a heavy chain comprising the amino acid sequence of SEQ ID NO:44 and a light chain comprising the amino acid sequence of SEQ ID NO:45. In some embodiments, the antibody comprises a heavy chain comprising the amino acid sequence of SEQ ID NO:46 and a light chain comprising the amino acid sequence of SEQ ID NO:47. In some embodiments, the antibody comprises a heavy chain comprising the amino acid sequence of SEQ ID NO:48 and a light chain comprising the amino acid sequence of SEQ ID NO:49. In some embodiments, the antibody comprises a heavy chain comprising the amino acid sequence of SEQ ID NO:52 and a light chain comprising the amino acid sequence of SEQ ID NO:53. In some embodiments, the antibody comprises a heavy chain comprising the amino acid sequence of SEQ ID NO:54 and a light chain comprising the amino acid sequence of SEQ ID NO:55. In some embodiments, the antibody comprises a heavy chain comprising the amino acid sequence of SEQ ID NO:56 and a light chain comprising the amino acid sequence of SEQ ID NO:57. In some embodiments, the antibody comprises a heavy chain comprising the amino acid sequence of SEQ ID NO:58 and a light chain comprising the amino acid sequence of SEQ ID NO:59. In some embodiments, the antibody comprises a heavy chain comprising the amino acid sequence of SEQ ID NO:60 and a light chain comprising the amino acid sequence of SEQ ID NO:61. In some embodiments, the antibody comprises a heavy chain comprising the amino acid sequence of SEQ ID NO:62 and a light chain comprising the amino acid sequence of SEQ ID NO:63. In some embodiments, the antibody comprises a heavy chain comprising the amino acid sequence of SEQ ID NO:64 and a light chain comprising the amino acid sequence of SEQ ID NO:65. In some embodiments, the antibody comprises a heavy chain comprising the amino acid sequence of SEQ ID NO:66 and a light chain comprising the amino acid sequence of SEQ ID NO:67. In some embodiments, the antibody comprises a heavy chain comprising the amino acid sequence of SEQ ID NO:68 and a light chain comprising the amino acid sequence of SEQ ID NO:69. In some embodiments, the antibody comprises a heavy chain comprising the amino acid sequence of SEQ ID NO:70 and a light chain comprising the amino acid sequence of SEQ ID NO:71. In some embodiments, the antibody comprises a heavy chain comprising the amino acid sequence of SEQ ID NO:72 and a light chain comprising the amino acid sequence of SEQ ID NO:73. In some embodiments, the antibody comprises a heavy chain comprising the amino acid sequence of SEQ ID NO:74 and a light chain comprising the amino acid sequence of SEQ ID NO:75. In some embodiments, the antibody comprises a heavy chain comprising the amino acid sequence of SEQ ID NO:76 and a light chain comprising the amino acid sequence of SEQ ID NO:77. In some embodiments, the antibody comprises a heavy chain comprising the amino acid sequence of SEQ ID NO:78 and a light chain comprising the amino acid sequence of SEQ ID NO:79. In some embodiments, the antibody comprises a heavy chain comprising the amino acid sequence of SEQ ID NO:80 and a light chain comprising the amino acid sequence of SEQ ID NO:81. In some embodiments, the antibody comprises a heavy chain comprising the amino acid sequence of SEQ ID NO:82 and a light chain comprising the amino acid sequence of SEQ ID NO:83. In some embodiments, the antibody comprises a heavy chain comprising the amino acid sequence of SEQ ID NO:84 and a light chain comprising the amino acid sequence of SEQ ID NO:85. In some embodiments, the antibody comprises a heavy chain comprising the amino acid sequence of SEQ ID NO:86 and a light chain comprising the amino acid sequence of SEQ ID NO:87. In some embodiments, the antibody comprises a heavy chain comprising the amino acid sequence of SEQ ID NO:88 and a light chain comprising the amino acid sequence of SEQ ID NO:89. In some embodiments, the antibody comprises a heavy chain comprising the amino acid sequence of SEQ ID NO:92 and a light chain comprising the amino acid sequence of SEQ ID NO:93. In some embodiments, the antibody comprises a heavy chain comprising the amino acid sequence of SEQ ID NO:94 and a light chain comprising the amino acid sequence of SEQ ID NO:95. In some embodiments, the antibody comprises a heavy chain comprising the amino acid sequence of SEQ ID NO:96 and a light chain comprising the amino acid sequence of SEQ ID NO:97. In some embodiments, the antibody comprises a heavy chain comprising the amino acid sequence of SEQ ID NO:98 and a light chain comprising the amino acid sequence of SEQ ID NO:99. In some embodiments, the antibody comprises a heavy chain comprising the amino acid sequence of SEQ ID NO:100 and a light chain comprising the amino acid sequence of SEQ ID NO:101. In some embodiments, the antibody comprises a heavy chain comprising the amino acid sequence of SEQ ID NO:102 and a light chain comprising the amino acid sequence of SEQ ID NO:103. In some embodiments, the antibody comprises a heavy chain comprising the amino acid sequence of SEQ ID NO:104 and a light chain comprising the amino acid sequence of SEQ ID NO:105. In some embodiments, the antibody comprises a heavy chain comprising the amino acid sequence of SEQ ID NO:106 and a light chain comprising the amino acid sequence of SEQ ID NO:107. In some embodiments, the antibody comprises a heavy chain comprising the amino acid sequence of SEQ ID NO:112 and a light chain comprising the amino acid sequence of SEQ ID NO:113. In some embodiments, the antibody comprises a heavy chain comprising the amino acid sequence of SEQ ID NO:114 and a light chain comprising the amino acid sequence of SEQ ID NO:115. In some embodiments, the antibody comprises a heavy chain comprising the amino acid sequence of SEQ ID NO:116 and a light chain comprising the amino acid sequence of SEQ ID NO:117. In some embodiments, the antibody comprises a heavy chain comprising the amino acid sequence of SEQ ID NO:118 and a light chain comprising the amino acid sequence of SEQ ID NO:119. In some embodiments, the antibody comprises a heavy chain comprising the amino acid sequence of SEQ ID NO:120 and a light chain comprising the amino acid sequence of SEQ ID NO:121. In some embodiments, the antibody comprises a heavy chain comprising the amino acid sequence of SEQ ID NO:122 and a light chain comprising the amino acid sequence of SEQ ID NO:123. In some embodiments, the antibody comprises a heavy chain comprising the amino acid sequence of SEQ ID NO:124 and a light chain comprising the amino acid sequence of SEQ ID NO:125. In some embodiments, the antibody comprises a heavy chain comprising the amino acid sequence of SEQ ID NO:126 and a light chain comprising the amino acid sequence of SEQ ID NO:127. In some embodiments, the antibody comprises a heavy chain comprising the amino acid sequence of SEQ ID NO:128 and a light chain comprising the amino acid sequence of SEQ ID NO:129. In some embodiments, the antibody comprises a heavy chain comprising the amino acid sequence of SEQ ID NO:130 and a light chain comprising the amino acid sequence of SEQ ID NO:131. In some embodiments, the antibody comprises a heavy chain comprising the amino acid sequence of SEQ ID NO:134 and a light chain comprising the amino acid sequence of SEQ ID NO:135. In some embodiments, the antibody comprises a heavy chain comprising the amino acid sequence of SEQ ID NO:672 and a light chain comprising the amino acid sequence of SEQ ID NO:673. In some embodiments, the antibody comprises a heavy chain comprising the amino acid sequence of SEQ ID NO:674 and a light chain comprising the amino acid sequence of SEQ ID NO:675. In some embodiments, the antibody comprises a heavy chain comprising the amino acid sequence of SEQ ID NO:676 and a light chain comprising the amino acid sequence of SEQ ID NO:677. In some embodiments, the antibody comprises a heavy chain comprising the amino acid sequence of SEQ ID NO:678 and a light chain comprising the amino acid sequence of SEQ ID NO:679. In some embodiments, the antibody comprises a heavy chain comprising the amino acid sequence of SEQ ID NO:684 and a light chain comprising the amino acid sequence of SEQ ID NO:685. In some embodiments, the antibody comprises a heavy chain comprising the amino acid sequence of SEQ ID NO:692 and a light chain comprising the amino acid sequence of SEQ ID NO:693. In some embodiments, the antibody comprises a heavy chain comprising the amino acid sequence of SEQ ID NO:694 and a light chain comprising the amino acid sequence of SEQ ID NO:695. In some embodiments, the antibody comprises a heavy chain comprising the amino acid sequence of SEQ ID NO:696 and a light chain comprising the amino acid sequence of SEQ ID NO:697. In some embodiments, the antibody comprises a heavy chain comprising the amino acid sequence of SEQ ID NO:698 and a light chain comprising the amino acid sequence of SEQ ID NO:699. In some embodiments, the antibody comprises a heavy chain comprising the amino acid sequence of SEQ ID NO:700 and a light chain comprising the amino acid sequence of SEQ ID NO:701. In some embodiments, the antibody comprises a heavy chain comprising the amino acid sequence of SEQ ID NO:702 and a light chain comprising the amino acid sequence of SEQ ID NO:703. In some embodiments, the antibody comprises a heavy chain comprising the amino acid sequence of SEQ ID NO:704 and a light chain comprising the amino acid sequence of SEQ ID NO:705. In some embodiments, the antibody comprises a heavy chain comprising the amino acid sequence of SEQ ID NO:706 and a light chain comprising the amino acid sequence of SEQ ID NO:707. In some embodiments, the antibody comprises a heavy chain comprising the amino acid sequence of SEQ ID NO:708 and a light chain comprising the amino acid sequence of SEQ ID NO:709. In some embodiments, the antibody comprises a heavy chain comprising the amino acid sequence of SEQ ID NO:710 and a light chain comprising the amino acid sequence of SEQ ID NO:711. In some embodiments, the antibody comprises a heavy chain comprising the amino acid sequence of SEQ ID NO:712 and a light chain comprising the amino acid sequence of SEQ ID NO:713. In some embodiments, the antibody comprises a heavy chain comprising the amino acid sequence of SEQ ID NO:714 and a light chain comprising the amino acid sequence of SEQ ID NO:715. In some embodiments, the antibody comprises a heavy chain comprising the amino acid sequence of SEQ ID NO:716 and a light chain comprising the amino acid sequence of SEQ ID NO:717. In some embodiments, the antibody comprises a heavy chain comprising the amino acid sequence of SEQ ID NO:718 and a light chain comprising the amino acid sequence of SEQ ID NO:719. In some embodiments, the antibody comprises a heavy chain comprising the amino acid sequence of SEQ ID NO:722 and a light chain comprising the amino acid sequence of SEQ ID NO:723. In some embodiments, the antibody comprises a heavy chain comprising the amino acid sequence of SEQ ID NO:724 and a light chain comprising the amino acid sequence of SEQ ID NO:725. In some embodiments, the antibody comprises a heavy chain comprising the amino acid sequence of SEQ ID NO:726 and a light chain comprising the amino acid sequence of SEQ ID NO:727. In some embodiments, the antibody comprises a heavy chain comprising the amino acid sequence of SEQ ID NO:728 and a light chain comprising the amino acid sequence of SEQ ID NO:729. In some embodiments, the antibody comprises a heavy chain comprising the amino acid sequence of SEQ ID NO:732 and a light chain comprising the amino acid sequence of SEQ ID NO:733. In some embodiments, the antibody comprises a heavy chain comprising the amino acid sequence of SEQ ID NO:734 and a light chain comprising the amino acid sequence of SEQ ID NO:735. In some embodiments, the antibody comprises a heavy chain comprising the amino acid sequence of SEQ ID NO:736 and a light chain comprising the amino acid sequence of SEQ ID NO:737. In some embodiments, the antibody comprises a heavy chain comprising the amino acid sequence of SEQ ID NO:738 and a light chain comprising the amino acid sequence of SEQ ID NO:739. In some embodiments, the antibody comprises a heavy chain comprising the amino acid sequence of SEQ ID NO:740 and a light chain comprising the amino acid sequence of SEQ ID NO:741. In some embodiments, the antibody comprises a heavy chain comprising the amino acid sequence of SEQ ID NO:742 and a light chain comprising the amino acid sequence of SEQ ID NO:743. In some embodiments, the antibody comprises a heavy chain comprising the amino acid sequence of SEQ ID NO:744 and a light chain comprising the amino acid sequence of SEQ ID NO:745. In some embodiments, the antibody comprises a heavy chain comprising the amino acid sequence of SEQ ID NO:746 and a light chain comprising the amino acid sequence of SEQ ID NO:747. In some embodiments, the antibody comprises a heavy chain comprising the amino acid sequence of SEQ ID NO:748 and a light chain comprising the amino acid sequence of SEQ ID NO:749. In some embodiments, the antibody comprises a heavy chain comprising the amino acid sequence of SEQ ID NO:750 and a light chain comprising the amino acid sequence of SEQ ID NO:751. In some embodiments, the antibody comprises a heavy chain comprising the amino acid sequence of SEQ ID NO:752 and a light chain comprising the amino acid sequence of SEQ ID NO:753. In some embodiments, the antibody comprises a heavy chain comprising the amino acid sequence of SEQ ID NO:754 and a light chain comprising the amino acid sequence of SEQ ID NO:755. In some embodiments, the antibody comprises a heavy chain comprising the amino acid sequence of SEQ ID NO:756 and a light chain comprising the amino acid sequence of SEQ ID NO:757. In some embodiments, the antibody comprises a heavy chain comprising the amino acid sequence of SEQ ID NO:758 and a light chain comprising the amino acid sequence of SEQ ID NO:759. In some embodiments, the antibody comprises a heavy chain comprising the amino acid sequence of SEQ ID NO:760 and a light chain comprising the amino acid sequence of SEQ ID NO:761. In some embodiments, the antibody comprises a heavy chain comprising the amino acid sequence of SEQ ID NO:762 and a light chain comprising the amino acid sequence of SEQ ID NO:763. In some embodiments, the antibody comprises a heavy chain comprising the amino acid sequence of SEQ ID NO:764 and a light chain comprising the amino acid sequence of SEQ ID NO:765. In some embodiments, the antibody comprises a heavy chain comprising the amino acid sequence of SEQ ID NO:766 and a light chain comprising the amino acid sequence of SEQ ID NO:767. In some embodiments, the antibody comprises a heavy chain comprising the amino acid sequence of SEQ ID NO:768 and a light chain comprising the amino acid sequence of SEQ ID NO:769. In some embodiments, the antibody comprises a heavy chain comprising the amino acid sequence of SEQ ID NO:770 and a light chain comprising the amino acid sequence of SEQ ID NO:771. In some embodiments, the antibody comprises a heavy chain comprising the amino acid sequence of SEQ ID NO:772 and a light chain comprising the amino acid sequence of SEQ ID NO:773. In some embodiments, the antibody comprises a heavy chain comprising the amino acid sequence of SEQ ID NO:774 and a light chain comprising the amino acid sequence of SEQ ID NO:775. In some embodiments, the antibody comprises a heavy chain comprising the amino acid sequence of SEQ ID NO:776 and a light chain comprising the amino acid sequence of SEQ ID NO:777.

[0708] In some embodiments, provided herein is an IL-23R binding protein comprising any one of the anti-IL-23R antibodies described above. In some embodiments, the IL-23R binding protein is an antibody comprising two heavy chains and two light chains. In some embodiments, the IL-23R binding protein is an antibody comprising two heavy chains comprising a same VH region and two light chains comprising a same VL region.

[0709] In a particular embodiment, antibodies or antigen binding fragments thereof are provided which were isolated in accordance with the procedures and processes provided herein and which upon binding analysis do not demonstrate particular or significant affinity or binding to IL-23R, or at least do not demonstrate binding or relevant affinity as tested herein, or do not demonstrate binding to the I23R ECD. These can be designated as non binders or as weak binders. These antibodies provide utility as matched or related controls in any of various assays or methods, including when used in combination with the demonstrated IL23R binding antibodies herein. For instance antibody I23RB5 does not show binding to IL-23R but is utilized in experiments provided herein, for example as set out in FIGS. 4 and 5 as a non-binder or weak binder, in such instance for example as a control antibody. The antibodies have unique and novel sequences, including VH, HC and H chain CDR sequences, and in many or most instances also have unique VL, LC and light chain CDR sequences. The following antibodies can be denoted as novel antibodies, without significant or recognized binding to IL23R: I23RB5, I23RB6, I23RB8, I23RB9, I23RB10, I23RB 80, I23RB101, I23RB104, I23RB149, I23RB189, I23RB273, I23RB278, I23RB328, I23RB329, I23RB330, and I23RB332.

[0710] These antibodies correspond to antibodies having sequences as indicated below:

[0711] In some embodiments, the antibody or antigen binding fragment provided herein comprises an HCDR1, an HCDR2, and an HCDR3 as set forth in SEQ ID NO:136, and an LCDR1, an LCDR2, and an LCDR3 as set forth in SEQ ID NO:137. In some embodiments, the antibody or antigen binding fragment comprises an HCDR1, an HCDR2, and an HCDR3 as set forth in SEQ ID NO:140, and an LCDR1, an LCDR2, and an LCDR3 as set forth in SEQ ID NO:141. In some embodiments, the antibody or antigen binding fragment comprises an HCDR1, an HCDR2, and an HCDR3 as set forth in SEQ ID NO:146, and an LCDR1, an LCDR2, and an LCDR3 as set forth in SEQ ID NO:147. In some embodiments, the antibody or antigen binding fragment comprises an HCDR1, an HCDR2, and an HCDR3 as set forth in SEQ ID NO:184, and an LCDR1, an LCDR2, and an LCDR3 as set forth in SEQ ID NO:185. In some embodiments, the antibody or antigen binding fragment comprises an HCDR1, an HCDR2, and an HCDR3 as set forth in SEQ ID NO:244, and an LCDR1, an LCDR2, and an LCDR3 as set forth in SEQ ID NO:245. In some embodiments, the antibody or antigen binding fragment comprises an HCDR1, an HCDR2, and an HCDR3 as set forth in SEQ ID NO:794, and an LCDR1, an LCDR2, and an LCDR3 as set forth in SEQ ID NO:795. In some embodiments, the antibody or antigen binding fragment comprises an HCDR1, an HCDR2, and an HCDR3 as set forth in SEQ ID NO:796, and an LCDR1, an LCDR2, and an LCDR3 as set forth in SEQ ID NO:797. In some embodiments, the antibody or antigen binding fragment comprises an HCDR1, an HCDR2, and an HCDR3 as set forth in SEQ ID NO:800, and an LCDR1, an LCDR2, and an LCDR3 as set forth in SEQ ID NO:801. In some embodiments, the antibody or antigen binding fragment comprises an HCDR1, an HCDR2, and an HCDR3 as set forth in SEQ ID NO:802, and an LCDR1, an LCDR2, and an LCDR3 as set forth in SEQ ID NO:803. In some embodiments, the antibody or antigen binding fragment comprises an HCDR1, an HCDR2, and an HCDR3 as set forth in SEQ ID NO:804, and an LCDR1, an LCDR2, and an LCDR3 as set forth in SEQ ID NO:805. In some embodiments, the antibody or antigen binding fragment comprises an HCDR1, an HCDR2, and an HCDR3 as set forth in SEQ ID NO:834, and an LCDR1, an LCDR2, and an LCDR3 as set forth in SEQ ID NO:835. In some embodiments, the antibody or antigen binding fragment comprises an HCDR1, an HCDR2, and an HCDR3 as set forth in SEQ ID NO:844, and an LCDR1, an LCDR2, and an LCDR3 as set forth in SEQ ID NO:845. In some embodiments, the antibody or antigen binding fragment comprises an HCDR1, an HCDR2, and an HCDR3 as set forth in SEQ ID NO:892, and an LCDR1, an LCDR2, and an LCDR3 as set forth in SEQ ID NO:893. In some embodiments, the antibody or antigen binding fragment comprises an HCDR1, an HCDR2, and an HCDR3 as set forth in SEQ ID NO:894, and an LCDR1, an LCDR2, and an LCDR3 as set forth in SEQ ID NO:895. In some embodiments, the antibody or antigen binding fragment comprises an HCDR1, an HCDR2, and an HCDR3 as set forth in SEQ ID NO:896, and an LCDR1, an LCDR2, and an LCDR3 as set forth in SEQ ID NO:897. In some embodiments, the antibody or antigen binding fragment comprises an HCDR1, an HCDR2, and an HCDR3 as set forth in SEQ ID NO:898 and an LCDR1, an LCDR2, and an LCDR3 as set forth in SEQ ID NO:899. In other embodiments, an antibody is provided comprising an HCDR1 comprising an amino acid sequence having at least 75%, 80%, 85%, 86%, 87%, 88%, 89%, 90%, 91%, 92%, 93%, 94%, 95%, 96%, 97%, 98%, 99%, or 100% sequence identity to any of SEQ ID NOs: 270, 282, 300, 414, 594, 924, 930, 942, 948, 954, 1044, 1074, 1218, 1224, 1230, and 1236; (ii) an HCDR2 comprising an amino acid sequence having at least 75%, 80%, 85%, 86%, 87%, 88%, 89%, 90%, 91%, 92%, 93%, 94%, 95%, 96%, 97%, 98%, 99%, or 100% sequence identity to any of SEQ ID NOs: 271, 283, 301, 415, 595, 925, 931, 943, 949, 955, 1045, 1075, 1219, 1225, 1231, and 1237, (iii) an HCDR3 comprising an amino acid sequence having at least 75%, 80%, 85%, 86%, 87%, 88%, 89%, 90%, 91%, 92%, 93%, 94%, 95%, 96%, 97%, 98%, 99%, or 100% sequence identity to SEQ ID NO: 272, 284, 302, 416, 596, 926, 932, 944, 950, 956, 1046, 1076, 1220, 1226, 1232, and 1238; (iv) a LCDR1 comprising an amino acid sequence having at least 75%, 80%, 85%, 86%, 87%, 88%, 89%, 90%, 91%, 92%, 93%, 94%, 95%, 96%, 97%, 98%, 99%, or 100% sequence identity to any of SEQ ID NOs: 273, 285, 303, 417, 597, 927, 933, 945, 951, 957, 1047, 1077, 1221, 1227, 1233, and 1239; (v) a LCDR2 comprising an amino acid sequence having at least 75%, 80%, 85%, 86%, 87%, 88%, 89%, 90%, 91%, 92%, 93%, 94%, 95%, 96%, 97%, 98%, 99%, or 100% sequence identity to any of SEQ ID NOs: 274, 286, 304, 418, 598, 928, 934, 946, 952, 958, 1048, 1078, 1222, 1228, 1234, and 1240; and/or (vi) a LCDR3 comprising an amino acid sequence having at least 75%, 80%, 85%, 86%, 87%, 88%, 89%, 90%, 91%, 92%, 93%, 94%, 95%, 96%, 97%, 98%, 99%, 100% sequence identity to any of SEQ ID NOs: 275, 287, 305, 419, 599, 929, 935, 947, 953, 959, 1049, 1079, 1223, 1229, 1235, and 1241. In some specific embodiments, an antibody is provided comprising: (i) a VH comprising an HCDR1, an HCDR2, and an HCDR3 having an amino acid sequence of SEQ ID NOs:270, 271, and 272, respectively, and (ii) an VL comprising an LCDR1, an LCDR2, and an LCDR3 having an amino acid sequence of SEQ ID NOs:273, 274, and 275, respectively. In some specific embodiments, provided herein is an antibody comprising: (i) a VH comprising an HCDR1, an HCDR2, and an HCDR3 having an amino acid sequence of SEQ ID NOs:282, 283, and 284, respectively, and (ii) an VL comprising an LCDR1, an LCDR2, and an LCDR3 having an amino acid sequence of SEQ ID NOs:285, 286, and 287, respectively. In some specific embodiments, provided herein is an antibody comprising: (i) a VH comprising an HCDR1, an HCDR2, and an HCDR3 having an amino acid sequence of SEQ ID NOs:300, 301, and 302, respectively, and (ii) an VL comprising an LCDR1, an LCDR2, and an LCDR3 having an amino acid sequence of SEQ ID NOs:303, 304, and 305, respectively. In some specific embodiments, provided herein is an antibody comprising: (i) a VH comprising an HCDR1, an HCDR2, and an HCDR3 having an amino acid sequence of SEQ ID NOs:414, 415, and 416, respectively, and (ii) an VL comprising an LCDR1, an LCDR2, and an LCDR3 having an amino acid sequence of SEQ ID NOs:417, 418, and 419, respectively. In some specific embodiments, provided herein is an antibody comprising: (i) a VH comprising an HCDR1, an HCDR2, and an HCDR3 having an amino acid sequence of SEQ ID NOs:594, 595, and 596, respectively, and (ii) an VL comprising an LCDR1, an LCDR2, and an LCDR3 having an amino acid sequence of SEQ ID NOs:597, 598, and 599, respectively. In some specific embodiments, provided herein is an antibody comprising: (i) a VH comprising an HCDR1, an HCDR2, and an HCDR3 having an amino acid sequence of SEQ ID NOs:924, 925, and 926, respectively, and (ii) an VL comprising an LCDR1, an LCDR2, and an LCDR3 having an amino acid sequence of SEQ ID NOs:927, 928, and 929, respectively. In some specific embodiments, provided herein is an antibody comprising: (i) a VH comprising an HCDR1, an HCDR2, and an HCDR3 having an amino acid sequence of SEQ ID NOs:930, 931, and 932, respectively, and (ii) an VL comprising an LCDR1, an LCDR2, and an LCDR3 having an amino acid sequence of SEQ ID NOs:933, 934, and 935, respectively. In some specific embodiments, provided herein is an antibody comprising: (i) a VH comprising an HCDR1, an HCDR2, and an HCDR3 having an amino acid sequence of SEQ ID NOs:942, 943, and 944, respectively, and (ii) an VL comprising an LCDR1, an LCDR2, and an LCDR3 having an amino acid sequence of SEQ ID NOs:945, 946, and 947, respectively. In some specific embodiments, provided herein is an antibody comprising: (i) a VH comprising an HCDR1, an HCDR2, and an HCDR3 having an amino acid sequence of SEQ ID NOs:948, 949, and 950, respectively, and (ii) an VL comprising an LCDR1, an LCDR2, and an LCDR3 having an amino acid sequence of SEQ ID NOs:951, 952, and 953, respectively. In some specific embodiments, provided herein is an antibody comprising: (i) a VH comprising an HCDR1, an HCDR2, and an HCDR3 having an amino acid sequence of SEQ ID NOs:954, 955, and 956, respectively, and (ii) an VL comprising an LCDR1, an LCDR2, and an LCDR3 having an amino acid sequence of SEQ ID NOs:957, 958, and 959, respectively. In some specific embodiments, provided herein is an antibody comprising: (i) a VH comprising an HCDR1, an HCDR2, and an HCDR3 having an amino acid sequence of SEQ ID NOs:1044, 1045, and 1046, respectively, and (ii) an VL comprising an LCDR1, an LCDR2, and an LCDR3 having an amino acid sequence of SEQ ID NOs:1047, 1048, and 1049, respectively. In some specific embodiments, provided herein is an antibody comprising: (i) a VH comprising an HCDR1, an HCDR2, and an HCDR3 having an amino acid sequence of SEQ ID NOs:1074, 1075, and 1076, respectively, and (ii) an VL comprising an LCDR1, an LCDR2, and an LCDR3 having an amino acid sequence of SEQ ID NOs:1077, 1078, and 1079, respectively. In some specific embodiments, provided herein is an antibody comprising: (i) a VH comprising an HCDR1, an HCDR2, and an HCDR3 having an amino acid sequence of SEQ ID NOs:1218, 1219, and 1220, respectively, and (ii) an VL comprising an LCDR1, an LCDR2, and an LCDR3 having an amino acid sequence of SEQ ID NOs:1221, 1222, and 1223, respectively. In some specific embodiments, provided herein is an antibody comprising: (i) a VH comprising an HCDR1, an HCDR2, and an HCDR3 having an amino acid sequence of SEQ ID NOs:1224, 1225, and 1226, respectively, and (ii) an VL comprising an LCDR1, an LCDR2, and an LCDR3 having an amino acid sequence of SEQ ID NOs:1227, 1228, and 1229, respectively. In some specific embodiments, provided herein is an antibody comprising: (i) a VH comprising an HCDR1, an HCDR2, and an HCDR3 having an amino acid sequence of SEQ ID NOs:1230, 1231, and 1232, respectively, and (ii) an VL comprising an LCDR1, an LCDR2, and an LCDR3 having an amino acid sequence of SEQ ID NOs:1233, 1234, and 1235, respectively. In some specific embodiments, provided herein is an antibody comprising: (i) a VH comprising an HCDR1, an HCDR2, and an HCDR3 having an amino acid sequence of SEQ ID NOs:1236, 1237, and 1238, respectively, and (ii) an VL comprising an LCDR1, an LCDR2, and an LCDR3 having an amino acid sequence of SEQ ID NOs:1239, 1240, and 1241, respectively. In some embodiments, the antibody or antigen binding fragment provided herein comprises a VH comprising the amino acid sequence of SEQ ID NO:136, and a VL comprising the amino acid sequence of SEQ ID NO:137. In some embodiments, the antibody or antigen binding fragment provided herein comprises a VH comprising the amino acid sequence of SEQ ID NO:140, and a VL comprising the amino acid sequence of SEQ ID NO:141. In some embodiments, the antibody or antigen binding fragment provided herein comprises a VH comprising the amino acid sequence of SEQ ID NO:146, and a VL comprising the amino acid sequence of SEQ ID NO: 147. In some embodiments, the antibody or antigen binding fragment provided herein comprises a VH comprising the amino acid sequence of SEQ ID NO:184, and a VL comprising the amino acid sequence of SEQ ID NO: 185. In some embodiments, the antibody or antigen binding fragment provided herein comprises a VH comprising the amino acid sequence of SEQ ID NO:244, and a VL comprising the amino acid sequence of SEQ ID NO:245. In some embodiments, the antibody or antigen binding fragment provided herein comprises a VH comprising the amino acid sequence of SEQ ID NO:794, and a VL comprising the amino acid sequence of SEQ ID NO:795. In some embodiments, the antibody or antigen binding fragment provided herein comprises a VH comprising the amino acid sequence of SEQ ID NO:796, and a VL comprising the amino acid sequence of SEQ ID NO:797. In some embodiments, the antibody or antigen binding fragment provided herein comprises a VH comprising the amino acid sequence of SEQ ID NO:800, and a VL comprising the amino acid sequence of SEQ ID NO:801. In some embodiments, the antibody or antigen binding fragment provided herein comprises a VH comprising the amino acid sequence of SEQ ID NO:802, and a VL comprising the amino acid sequence of SEQ ID NO:803. In some embodiments, the antibody or antigen binding fragment provided herein comprises a VH comprising the amino acid sequence of SEQ ID NO:804, and a VL comprising the amino acid sequence of SEQ ID NO:805. In some embodiments, the antibody or antigen binding fragment provided herein comprises a VH comprising the amino acid sequence of SEQ ID NO:834, and a VL comprising the amino acid sequence of SEQ ID NO:835. In some embodiments, the antibody or antigen binding fragment provided herein comprises a VH comprising the amino acid sequence of SEQ ID NO:844, and a VL comprising the amino acid sequence of SEQ ID NO:845. In some embodiments, the antibody or antigen binding fragment provided herein comprises a VH comprising the amino acid sequence of SEQ ID NO:892, and a VL comprising the amino acid sequence of SEQ ID NO:893. In some embodiments, the antibody or antigen binding fragment provided herein comprises a VH comprising the amino acid sequence of SEQ ID NO:894, and a VL comprising the amino acid sequence of SEQ ID NO:895. In some embodiments, the antibody or antigen binding fragment provided herein comprises a VH comprising the amino acid sequence of SEQ ID NO:896, and a VL comprising the amino acid sequence of SEQ ID NO:897. In some embodiments, the antibody or antigen binding fragment provided herein comprises a VH comprising the amino acid sequence of SEQ ID NO:898 and a VL comprising the amino acid sequence of SEQ ID NO:899.

[0712] In some embodiments, the antibody or antigen binding fragment provided herein comprises a VH domain having at least 75%, at least 80%, at least 85%, at least 90%, at least 91%, at least 92%, at least 93%, at least 94%, at least 95%, at least 96%, at least 97%, at least 98%, or at least 99% sequence identity to the amino acid sequence of SEQ ID NO: 136, and a VL domain having at least 75%, at least 80%, at least 85%, at least 90%, at least 91%, at least 92%, at least 93%, at least 94%, at least 95%, at least 96%, at least 97%, at least 98%, or at least 99% sequence identity to the amino acid sequence of SEQ ID NO:137. In some embodiments, the antibody or antigen binding fragment provided herein comprises a VH domain having at least 75%, at least 80%, at least 85%, at least 90%, at least 91%, at least 92%, at least 93%, at least 94%, at least 95%, at least 96%, at least 97%, at least 98%, or at least 99% sequence identity to the amino acid sequence of SEQ ID NO:140, and a VL domain having at least 75%, at least 80%, at least 85%, at least 90%, at least 91%, at least 92%, at least 93%, at least 94%, at least 95%, at least 96%, at least 97%, at least 98%, or at least 99% sequence identity to the amino acid sequence of SEQ ID NO:141. In some embodiments, the antibody or antigen binding fragment provided herein comprises a VH domain having at least 75%, at least 80%, at least 85%, at least 90%, at least 91%, at least 92%, at least 93%, at least 94%, at least 95%, at least 96%, at least 97%, at least 98%, or at least 99% sequence identity to the amino acid sequence of SEQ ID NO:146, and a VL domain having at least 75%, at least 80%, at least 85%, at least 90%, at least 91%, at least 92%, at least 93%, at least 94%, at least 95%, at least 96%, at least 97%, at least 98%, or at least 99% sequence identity to the amino acid sequence of SEQ ID NO:147. In some embodiments, the antibody or antigen binding fragment provided herein comprises a VH domain having at least 75%, at least 80%, at least 85%, at least 90%, at least 91%, at least 92%, at least 93%, at least 94%, at least 95%, at least 96%, at least 97%, at least 98%, or at least 99% sequence identity to the amino acid sequence of SEQ ID NO:184, and a VL domain having at least 75%, at least 80%, at least 85%, at least 90%, at least 91%, at least 92%, at least 93%, at least 94%, at least 95%, at least 96%, at least 97%, at least 98%, or at least 99% sequence identity to the amino acid sequence of SEQ ID NO:185. In some embodiments, the antibody or antigen binding fragment provided herein comprises a VH domain having at least 75%, at least 80%, at least 85%, at least 90%, at least 91%, at least 92%, at least 93%, at least 94%, at least 95%, at least 96%, at least 97%, at least 98%, or at least 99% sequence identity to the amino acid sequence of SEQ ID NO:794, and a VL domain having at least 75%, at least 80%, at least 85%, at least 90%, at least 91%, at least 92%, at least 93%, at least 94%, at least 95%, at least 96%, at least 97%, at least 98%, or at least 99% sequence identity to the amino acid sequence of SEQ ID NO:795. In some embodiments, the antibody or antigen binding fragment provided herein comprises a VH domain having at least 75%, at least 80%, at least 85%, at least 90%, at least 91%, at least 92%, at least 93%, at least 94%, at least 95%, at least 96%, at least 97%, at least 98%, or at least 99% sequence identity to the amino acid sequence of SEQ ID NO:796, and a VL domain having at least 75%, at least 80%, at least 85%, at least 90%, at least 91%, at least 92%, at least 93%, at least 94%, at least 95%, at least 96%, at least 97%, at least 98%, or at least 99% sequence identity to the amino acid sequence of SEQ ID NO:797. In some embodiments, the antibody or antigen binding fragment provided herein comprises a VH domain having at least 75%, at least 80%, at least 85%, at least 90%, at least 91%, at least 92%, at least 93%, at least 94%, at least 95%, at least 96%, at least 97%, at least 98%, or at least 99% sequence identity to the amino acid sequence of SEQ ID NO:800, and a VL domain having at least 75%, at least 80%, at least 85%, at least 90%, at least 91%, at least 92%, at least 93%, at least 94%, at least 95%, at least 96%, at least 97%, at least 98%, or at least 99% sequence identity to the amino acid sequence of SEQ ID NO:801. In some embodiments, the antibody or antigen binding fragment provided herein comprises a VH domain having at least 75%, at least 80%, at least 85%, at least 90%, at least 91%, at least 92%, at least 93%, at least 94%, at least 95%, at least 96%, at least 97%, at least 98%, or at least 99% sequence identity to the amino acid sequence of SEQ ID NO:802, and a VL domain having at least 75%, at least 80%, at least 85%, at least 90%, at least 91%, at least 92%, at least 93%, at least 94%, at least 95%, at least 96%, at least 97%, at least 98%, or at least 99% sequence identity to the amino acid sequence of SEQ ID NO:803. In some embodiments, the antibody or antigen binding fragment provided herein comprises a VH domain having at least 75%, at least 80%, at least 85%, at least 90%, at least 91%, at least 92%, at least 93%, at least 94%, at least 95%, at least 96%, at least 97%, at least 98%, or at least 99% sequence identity to the amino acid sequence of SEQ ID NO:804, and a VL domain having at least 75%, at least 80%, at least 85%, at least 90%, at least 91%, at least 92%, at least 93%, at least 94%, at least 95%, at least 96%, at least 97%, at least 98%, or at least 99% sequence identity to the amino acid sequence of SEQ ID NO:805. In some embodiments, the antibody or antigen binding fragment provided herein comprises a VH domain having at least 75%, at least 80%, at least 85%, at least 90%, at least 91%, at least 92%, at least 93%, at least 94%, at least 95%, at least 96%, at least 97%, at least 98%, or at least 99% sequence identity to the amino acid sequence of SEQ ID NO:834, and a VL domain having at least 75%, at least 80%, at least 85%, at least 90%, at least 91%, at least 92%, at least 93%, at least 94%, at least 95%, at least 96%, at least 97%, at least 98%, or at least 99% sequence identity to the amino acid sequence of SEQ ID NO:835. In some embodiments, the antibody or antigen binding fragment provided herein comprises a VH domain having at least 75%, at least 80%, at least 85%, at least 90%, at least 91%, at least 92%, at least 93%, at least 94%, at least 95%, at least 96%, at least 97%, at least 98%, or at least 99% sequence identity to the amino acid sequence of SEQ ID NO:844, and a VL domain having at least 75%, at least 80%, at least 85%, at least 90%, at least 91%, at least 92%, at least 93%, at least 94%, at least 95%, at least 96%, at least 97%, at least 98%, or at least 99% sequence identity to the amino acid sequence of SEQ ID NO:845. In some embodiments, the antibody or antigen binding fragment provided herein comprises a VH domain having at least 75%, at least 80%, at least 85%, at least 90%, at least 91%, at least 92%, at least 93%, at least 94%, at least 95%, at least 96%, at least 97%, at least 98%, or at least 99% sequence identity to the amino acid sequence of SEQ ID NO:892, and a VL domain having at least 75%, at least 80%, at least 85%, at least 90%, at least 91%, at least 92%, at least 93%, at least 94%, at least 95%, at least 96%, at least 97%, at least 98%, or at least 99% sequence identity to the amino acid sequence of SEQ ID NO:893. In some embodiments, the antibody or antigen binding fragment provided herein comprises a VH domain having at least 75%, at least 80%, at least 85%, at least 90%, at least 91%, at least 92%, at least 93%, at least 94%, at least 95%, at least 96%, at least 97%, at least 98%, or at least 99% sequence identity to the amino acid sequence of SEQ ID NO:894, and a VL domain having at least 75%, at least 80%, at least 85%, at least 90%, at least 91%, at least 92%, at least 93%, at least 94%, at least 95%, at least 96%, at least 97%, at least 98%, or at least 99% sequence identity to the amino acid sequence of SEQ ID NO:895. In some embodiments, the antibody or antigen binding fragment provided herein comprises a VH domain having at least 75%, at least 80%, at least 85%, at least 90%, at least 91%, at least 92%, at least 93%, at least 94%, at least 95%, at least 96%, at least 97%, at least 98%, or at least 99% sequence identity to the amino acid sequence of SEQ ID NO:896, and a VL domain having at least 75%, at least 80%, at least 85%, at least 90%, at least 91%, at least 92%, at least 93%, at least 94%, at least 95%, at least 96%, at least 97%, at least 98%, or at least 99% sequence identity to the amino acid sequence of SEQ ID NO:897. In some embodiments, the antibody or antigen binding fragment provided herein comprises a VH domain having at least 75%, at least 80%, at least 85%, at least 90%, at least 91%, at least 92%, at least 93%, at least 94%, at least 95%, at least 96%, at least 97%, at least 98%, or at least 99% sequence identity to the amino acid sequence of SEQ ID NO:898 and a VL domain having at least 75%, at least 80%, at least 85%, at least 90%, at least 91%, at least 92%, at least 93%, at least 94%, at least 95%, at least 96%, at least 97%, at least 98%, or at least 99% sequence identity to the amino acid sequence of SEQ ID NO:899. In some embodiments, the antibody or antigen binding fragment provided herein binds to the same epitope as an antibody comprising a VH comprising the amino acid sequence of SEQ ID NO:136, and a VL comprising the amino acid sequence of SEQ ID NO: 137. In some embodiments, the antibody or antigen binding fragment provided herein binds to the same epitope as an antibody comprising a VH comprising the amino acid sequence of SEQ ID NO:140, and a VL comprising the amino acid sequence of SEQ ID NO:141. In some embodiments, the antibody or antigen binding fragment provided herein binds to the same epitope as an antibody comprising a VH comprising the amino acid sequence of SEQ ID NO:146, and a VL comprising the amino acid sequence of SEQ ID NO: 147. In some embodiments, the antibody or antigen binding fragment provided herein binds to the same epitope as an antibody comprising a VH comprising the amino acid sequence of SEQ ID NO:184, and a VL comprising the amino acid sequence of SEQ ID NO: 185. In some embodiments, the antibody or antigen binding fragment provided herein binds to the same epitope as an antibody comprising a VH comprising the amino acid sequence of SEQ ID NO:244, and a VL comprising the amino acid sequence of SEQ ID NO:245. In some embodiments, the antibody or antigen binding fragment provided herein binds to the same epitope as an antibody comprising a VH comprising the amino acid sequence of SEQ ID NO:794, and a VL comprising the amino acid sequence of SEQ ID NO:795. In some embodiments, the antibody or antigen binding fragment provided herein binds to the same epitope as an antibody comprising a VH comprising the amino acid sequence of SEQ ID NO:796, and a VL comprising the amino acid sequence of SEQ ID NO:797. In some embodiments, the antibody or antigen binding fragment provided herein binds to the same epitope as an antibody comprising a VH comprising the amino acid sequence of SEQ ID NO:800, and a VL comprising the amino acid sequence of SEQ ID NO:801. In some embodiments, the antibody or antigen binding fragment provided herein binds to the same epitope as an antibody comprising a VH comprising the amino acid sequence of SEQ ID NO:802, and a VL comprising the amino acid sequence of SEQ ID NO:803. In some embodiments, the antibody or antigen binding fragment provided herein binds to the same epitope as an antibody comprising a VH comprising the amino acid sequence of SEQ ID NO:804, and a VL comprising the amino acid sequence of SEQ ID NO:805. In some embodiments, the antibody or antigen binding fragment provided herein binds to the same epitope as an antibody comprising a VH comprising the amino acid sequence of SEQ ID NO:834, and a VL comprising the amino acid sequence of SEQ ID NO:835. In some embodiments, the antibody or antigen binding fragment provided herein binds to the same epitope as an antibody comprising a VH comprising the amino acid sequence of SEQ ID NO:844, and a VL comprising the amino acid sequence of SEQ ID NO:845. In some embodiments, the antibody or antigen binding fragment provided herein binds to the same epitope as an antibody comprising a VH comprising the amino acid sequence of SEQ ID NO:892, and a VL comprising the amino acid sequence of SEQ ID NO:893. In some embodiments, the antibody or antigen binding fragment provided herein binds to the same epitope as an antibody comprising a VH comprising the amino acid sequence of SEQ ID NO:894, and a VL comprising the amino acid sequence of SEQ ID NO:895. In some embodiments, the antibody or antigen binding fragment provided herein binds to the same epitope as an antibody comprising a VH comprising the amino acid sequence of SEQ ID NO:896, and a VL comprising the amino acid sequence of SEQ ID NO:897. In some embodiments, the antibody or antigen binding fragment provided herein binds to the same epitope as an antibody comprising a VH comprising the amino acid sequence of SEQ ID NO:898 and a VL comprising the amino acid sequence of SEQ ID NO:899.

[0713] In some embodiments, the antibody comprises a heavy chain comprising the amino acid sequence of SEQ ID NO:2 and a light chain comprising the amino acid sequence of SEQ ID NO:3. In some embodiments, the antibody comprises a heavy chain comprising the amino acid sequence of SEQ ID NO:6 and a light chain comprising the amino acid sequence of SEQ ID NO:7. In some embodiments, the antibody comprises a heavy chain comprising the amino acid sequence of SEQ ID NO:12 and a light chain comprising the amino acid sequence of SEQ ID NO:13. In some embodiments, the antibody comprises a heavy chain comprising the amino acid sequence of SEQ ID NO:50 and a light chain comprising the amino acid sequence of SEQ ID NO:51. In some embodiments, the antibody comprises a heavy chain comprising the amino acid sequence of SEQ ID NO:110 and a light chain comprising the amino acid sequence of SEQ ID NO:111. In some embodiments, the antibody comprises a heavy chain comprising the amino acid sequence of SEQ ID NO:680 and a light chain comprising the amino acid sequence of SEQ ID NO:681. In some embodiments, the antibody comprises a heavy chain comprising the amino acid sequence of SEQ ID NO:682 and a light chain comprising the amino acid sequence of SEQ ID NO:683. In some embodiments, the antibody comprises a heavy chain comprising the amino acid sequence of SEQ ID NO:686 and a light chain comprising the amino acid sequence of SEQ ID NO:687. In some embodiments, the antibody comprises a heavy chain comprising the amino acid sequence of SEQ ID NO:688 and a light chain comprising the amino acid sequence of SEQ ID NO:689. In some embodiments, the antibody comprises a heavy chain comprising the amino acid sequence of SEQ ID NO:690 and a light chain comprising the amino acid sequence of SEQ ID NO:691. In some embodiments, the antibody comprises a heavy chain comprising the amino acid sequence of SEQ ID NO:720 and a light chain comprising the amino acid sequence of SEQ ID NO:721. In some embodiments, the antibody comprises a heavy chain comprising the amino acid sequence of SEQ ID NO:730 and a light chain comprising the amino acid sequence of SEQ ID NO:731. In some embodiments, the antibody comprises a heavy chain comprising the amino acid sequence of SEQ ID NO:778 and a light chain comprising the amino acid sequence of SEQ ID NO:779. In some embodiments, the antibody comprises a heavy chain comprising the amino acid sequence of SEQ ID NO:780 and a light chain comprising the amino acid sequence of SEQ ID NO:781. In some embodiments, the antibody comprises a heavy chain comprising the amino acid sequence of SEQ ID NO:782 and a light chain comprising the amino acid sequence of SEQ ID NO:783. In some embodiments, the antibody comprises a heavy chain comprising the amino acid sequence of SEQ ID NO:784 and a light chain comprising the amino acid sequence of SEQ ID NO:785.

[0714] Thus, in an aspect or embodiment of the invention, including methods and assays and kits provided herein, one or more of the above indicated and provided non binders or weak binders antibodies are included as a control. The non binder or weak binder antibodies may be combined with other antibodies, including antibodies of one or more unique epitope bin, including as a control or to test for true IL-23R antigen binding, or to compare distinct or unique IL-23R epitope binding or for epitope characterization or comparison.

[0715] In some embodiments, the IL-23R binding protein is an antibody comprising a particular designated light chain, particularly a consensus or common light chain, such as a common LC sequence, a common VL sequence and/or a set of common light chain CDR1, CDR2 and CDR3 sequences and a unique or distinct heavy chain comprising a unique or distinct HC sequence, VH sequence and/or a unique heavy chain set of CDRs (CDR1, CDR2 and CDR3). This and these antibodies may have unique and different epitope binding (including being grouped in distinct or the same epitope bins) and/or affinity characteristics, such characateristics primarily determined or even solely determined, by their heavy chain sequence(s). As described herein, including in Tables 13, 14 and 15, common light chain sequences and their unique heavy chain components in certain antibodies are detailed.

[0716] Antibodies, particularly human anti-human IL-23R antibodies can be characterized as having an identical LC, VL and light chain CDR1, CDR2 and CDR3 sequence and grouped according to the following. The antibody identifier and VH sequence is provided for each relevant antibody. The heavy chain CDRs are provided in the application including in Table 9 and can be determined within the VH sequence by known and available methods and according to antibody standards. There are several groups of antibodies with the antibodies in each group sharing an identical VL, LC and light chain CDR1, CDR2 and CDR3 sequence, but having distinct heavy chain sequences. The antibodies are grouped by light chain consensus:

Group 1—VL sequence SEQ ID NO:1247, or the CDR1, CR2 and CDR3 sequences therein, and VH sequence selected from:
[0717] I23RB1 SEQ ID NO:786
[0718] I23RB2 SEQ ID NO:788
[0719] I23RB3 SEQ ID NO:790
[0720] I23RB4 SEQ ID NO:792
[0721] I23RB8 SEQ ID NO:800
[0722] I23RB9 SEQ ID NO:802
[0723] I23RB268 SEQ ID NO:824
[0724] I23RB270 SEQ ID NO:828
[0725] I23RB291 SEQ ID NO:870
   Group2—VL sequence SEQ ID NO:1248, or the CDR1, CR2 and CDR3 sequences therein, and VH sequence selected from:
[0726] I23RB5 SEQ ID NO:794
[0727] I23RB266 SEQ ID NO:820
[0728] I23RB271 SEQ ID NO:830
[0729] I23RB273 SEQ ID NO:834
[0730] I23RB274 SEQ ID NO:836
[0731] I23RB275 SEQ ID NO:838
[0732] I23RB276 SEQ ID NO:840
[0733] I23RB277 SEQ ID NO:842
[0734] I23RB279 SEQ ID NO:846
[0735] I23RB281 SEQ ID NO:850
[0736] I23RB282 SEQ ID NO:852
[0737] I23RB284 SEQ ID NO:856
[0738] I23RB286 SEQ ID NO:858
[0739] I23RB289 SEQ ID NO:866
[0740] I23RB290 SEQ ID NO:868
[0741] I23RB292 SEQ ID NO:872
   Group3—VL sequence SEQ ID NO:1249, or the CDR1, CR2 and CDR3 sequences therein, and VH sequence selected from:
[0742] I23RB6 SEQ ID NO:796
[0743] I23RB10 SEQ ID NO:804
   Group4—VL sequence SEQ ID NO:1250, or the CDR1, CR2 and CDR3 sequences therein, and VH sequence selected from:
[0744] I23RB259 SEQ ID NO:806
[0745] I23RB316 SEQ ID NO:880
   Group5—VL sequence SEQ ID NO:1251, or the CDR1, CR2 and CDR3 sequences therein, and VH sequence selected from:
[0746] I23RB267 SEQ ID NO:822
[0747] I23RB269 SEQ ID NO:826
[0748] I23RB272 SEQ ID NO:832
[0749] I23RB278 SEQ ID NO:844
[0750] I23RB280 SEQ ID NO:848
[0751] I23RB283 SEQ ID NO:854
[0752] I23RB287 SEQ ID NO:862
[0753] I23RB288 SEQ ID NO:864

[0754] For each of the above groups and particular antibodies, the heavy chain sequences HC, VH and Heavy chain CDR1, CDR2 and CDR3 contribute to and have responsible significance for epitope binding and affinity distinctions between and/or among the antibodes. The heavy chain in each instance determines the binding and affinity or uniqueness and epitope specificity and epitope differential binding of the antibodies. Heavy chain domain only or VHH antibodies based on the heavy chain sequence—either of the VH sequence, HC sequence, or comprising the CDR1, CDR2 and CDR3 sequences of the heavy chain—of any of these grouped antibodies may be of particular interest, use and application and are an aspect and embodiment provided and described herein.In some embodiments, the IL-23R binding protein is a monoclonal antibody, including a mouse, chimeric, humanized or human antibody. In some embodiments, the anti-IL-23R antibody is an antibody fragment, e.g., a scFv. In some embodiments, the IL-23R binding protein is a fusion protein comprising the anti-IL-23R antibody provided herein. In other embodiments, the IL-23R binding protein is a multispecific antibody comprising the anti-IL-23R antibody provided herein. Other exemplary IL-23R binding molecules are described in more detail in the following sections.

[0755] In some embodiments, the anti-IL-23R antibody or antigen binding protein according to any of the above embodiments may incorporate any of the features, singly or in combination, as described below.

### Antibody Fragments

[0756] As used herein, the term “antibody” also includes various antibody fragments thereof. Antibodies provided herein include, but are not limited to, immunoglobulin molecules and immunologically active portions of immunoglobulin molecules. The immunoglobulin molecules provided herein can be of any class (e.g., IgG, IgE, IgM, IgD, and IgA) or any subclass (e.g., IgG1, IgG2, IgG3, IgG4, IgA1, and IgA2) of immunoglobulin molecule. In some embodiments, the antibody is an IgG antibody. In some embodiments, the IgG antibody is an IgG1 antibody. In some embodiments, the IgG antibody is an IgG2, IgG3, or IgG4 antibody.

[0757] Variants and derivatives of antibodies include antibody functional fragments or antigen binding fragments that retain the ability to bind to an antigen. Exemplary functional fragments or antigen binding fragments include Fab fragments (e.g., an antibody fragment that contains the antigen-binding domain and comprises a light chain and part of a heavy chain bridged by a disulfide bond); Fab′ (e.g., an antibody fragment containing a single antigen-binding domain comprising an Fab and an additional portion of the heavy chain through the hinge region); F(ab′)2 (e.g., two Fab′ molecules joined by interchain disulfide bonds in the hinge regions of the heavy chains; the Fab′ molecules may be directed toward the same or different epitopes); a bispecific Fab (e.g., a Fab molecule having two antigen binding domains, each of which may be directed to a different epitope); a single chain comprising a variable region, also known as, scFv (e.g., the variable, antigen-binding determinative region of a single light and heavy chain of an antibody linked together by a chain of, e.g., 10-25 amino acids); a disulfide-linked Fv, or dsFv (e.g., the variable, antigen-binding determinative region of a single light and heavy chain of an antibody linked together by a disulfide bond); a VHH or nanobody (e.g. the variable, antigen-determinative region or an antigen binding domain of the heavy chain of an antibody only); a camelized VH (e.g., the variable, antigen-binding determinative region of a single heavy chain of an antibody in which some amino acids at the VH interface are those found in the heavy chain of naturally occurring camel antibodies); a bispecific scFv (e.g., an scFv or a dsFv molecule having two antigen-binding domains, each of which may be directed to a different epitope); a diabody (e.g., a dimerized scFv formed when the VH domain of a first scFv assembles with the VL domain of a second scFv and the VL domain of the first scFv assembles with the VH domain of the second scFv; the two antigen-binding regions of the diabody may be directed towards the same or different epitopes); a triabody (e.g., a trimerized scFv, formed in a manner similar to a diabody, but in which three antigen-binding domains are created in a single complex; the three antigen binding domains may be directed towards the same or different epitopes); a tetrabody (e.g., a tetramerized scFv, formed in a manner similar to a diabody, but in which four antigen-binding domains are created in a single complex; the four antigen binding domains may be directed towards the same or different epitopes); and other non-full length portions of heavy and/or light chains alone or in any combination.

[0758] Nanobodies or VHH antibodies, are single domain (Heavy chain variable region VHH) antibodies (Ward, E. S. et al., Nature 341, 544-546 (1989)). Single domain antibodies were initially isolated firm camelid animals and have been designated interchangeably as camelid antibodies, nanobodies or VHH. A VHH antibody corresponds to the variable region of an antibody heavy chain and has a very small size of around 15 kDa—hence the name “nanobody”, The advantage of these antibody-derived molecules is their small size which can enable their binding to hidden epitopes not accessible to whole antibodies. In the context of therapeutic applications, a small molecular weight also means an efficient penetration and fast clearance. Both scFv and VHH nanobodies can be linked to the Fc fragment of the desired species and keep their specificity and binding properties and are then termed minibody.

[0759] Nanobodies are small, low molecular weight, single-domain, heavy-chain only antibody. Owing to its smaller size, genes of these proteins can be readily cloned and manipulated to present on plasmids or in integrated form, expression vector, etc. Therefore, by using molecular cloning techniques, nanobodies against various antigens or against distinct epitopes on a single antigen can be presented, even on a single or multiple constructs, and be provided in an assay, to cells in an in vitro or in vivo study, to a target region or to the systemic circulation.

[0760] Antibody(ies) comprising linked nanobodies, such as multimeric and bi-specific versions are included in embodiments of the invention. Thus, two or more nanobodies or sequences encoding two or more nanobodies can be covalently linked, gthrough a linker sequence or any such other recognized and applicable means, to form a bispecific or multimeric form of the nanobody(ies). In a an embodiment, two distinct nanobodies are linked. In an embodiment a single nanobody is multimerized through linkage, which may have applicability to increase binding, avidity, affinity. In an embodiment, two or more nanobodies, including nanobodies directed against distinct IL-23R protein epitopes (such as epitope bins) are linked.

[0761] Described and provided herein are numerous IL-23R antibodies, particularly human phage library derived antibodies which have identical light chain VL and LCDR1, LCDR2 and LCDR3 sequences and unique heavy chain sequences, including unique and distinct HCDR1, HCDR2 and HCDR3 sequences. Despite identical light chains, these antibodies exhibit distinct binding affinities and binding characteristics with regard to IL-23R, including in instances recognizing distinct epitopes, being placed in distinct epitope bins in the analysis provided herein, The heavy chain sequences, particularly the VHH sequences, and the heavy chain CDR1, CDR2 and CDR3 sequences of these antibodies thus are the distinctive characteristic of these antibodies and significantly contribute to or are responsible for their distinctions. These antibodies demonstrate the importance of heavy chain sequence, particularly heavy chain antigen binding domains. Further, the relevance of VHH antibodies or nanobodies as useful and applicable is also demonstrated. In a particular embodiment, VHH antibodies comprising the VH sequences or comprising one or more CDRs set forth in SEQ ID NOs:136-269, 786-899 are provided herein. In one embodiment, VHH antibodies comprising the VH sequences or comprising one or more CDRs set forth in SEQ ID NOs: 786-899 are provided herein. In one embodiment, VHH antibodies comprising the VH sequences or comprising one or more CDRs set forth in SEQ ID NOs: 786-797, 800-807, 820-873 or 880-881 are provided herein.

[0762] Various techniques have been developed for the production of antibody fragments. Traditionally, these fragments were derived via proteolytic digestion of intact antibodies (see, e.g., Morimoto et al., 1992, J. Biochem. Biophys. Methods 24:107-17; and Brennan et al., 1985, Science 229:81-83). However, these fragments can now be produced directly by recombinant host cells. For example, Fab, Fv, and scFv antibody fragments can all be expressed in and secreted from E. coli or yeast cells, thus allowing the facile production of large amounts of these fragments. Antibody fragments can be isolated from the antibody phage libraries discussed above. Alternatively, Fab′-SH fragments can be directly recovered from E. coli and chemically coupled to form F(ab′)2 fragments (Carter et al., 1992, Bio/Technology 10:163-67). According to another approach, F(ab′)2 fragments can be isolated directly from recombinant host cell culture. Fab and F(ab′)2 fragment with increased in vivo half-life comprising salvage receptor binding epitope residues are described in, for example, U.S. Pat. No. 5,869,046. Other techniques for the production of antibody fragments will be apparent to the skilled practitioner. In certain embodiments, an antibody is a single chain Fv fragment (scFv) (see, e.g., WO 93/16185; U.S. Pat. Nos. 5,571,894 and 5,587,458). Fv and scFv have intact combining sites that are devoid of constant regions; thus, they may be suitable for reduced nonspecific binding during in vivo use. scFv fusion proteins may be constructed to yield fusion of an effector protein at either the amino or the carboxy terminus of a scFv (See, e.g., Borrebaeck ed., supra). The antibody fragment may also be a “linear antibody,” for example, as described in the references cited above. Such linear antibodies may be monospecific or multi-specific, such as bispecific.

### Humanized Antibodies

[0763] The antibodies described herein include humanized antibodies. Humanized antibodies, such as the humanized antibodies disclosed herein can be produced using a variety of techniques known in the art, including but not limited to, CDR-grafting (European Patent No. EP 239,400; International publication No. WO 91/09967; and U.S. Pat. Nos. 5,225,539, 5,530,101, and 5,585,089), veneering or resurfacing (European Patent Nos. EP 592,106 and EP 519,596; Padlan, Molecular Immunology 28(4/5):489-498 (1991); Studnicka et al., Protein Engineering 7(6):805-814 (1994); and Roguska et al., PNAS 91:969-973 (1994)), chain shuffling (U.S. Pat. No. 5,565,332), and techniques disclosed in, e.g., U.S. Pat. Nos. 6,407,213, 5,766,886, WO 9317105, Tan et al., J. Immunol. 169:1119 25 (2002), Caldas et al., Protein Eng. 13(5):353-60 (2000), Morea et al., Methods 20(3):267 79 (2000), Baca et al., J. Biol. Chem. 272(16):10678-84 (1997), Roguska et al., Protein Eng. 9(10):895 904 (1996), Couto et al., Cancer Res. 55 (23 Supp):5973s- 5977s (1995), Couto et al., Cancer Res. 55(8):1717-22 (1995), Sandhu J S, Gene 150(2):409-10 (1994), and Pedersen et al., J. Mol. Biol. 235(3):959-73 (1994). See also U.S. Patent Pub. No. US 2005/0042664 A1 (Feb. 24, 2005), each of which is incorporated by reference herein in its entirety.

[0764] In some embodiments, antibodies provided herein can be humanized antibodies that bind to IL-23R, including human IL-23R. For example, humanized antibodies of the present disclosure may comprise one or more CDRs set forth in SEQ ID NOs:136-269, 786-899. In some embodiments, humanized antibodies may comprise one or more CDRs set forth in the mouse antibodies provided herein, including the antibodies derived by immunization including SEQ ID NO:s 136-269, and in SEQ ID NOs:784-785. Various methods for humanizing non-human antibodies are known in the art. For example, a humanized antibody can have one or more amino acid residues introduced into it from a source that is non-human. These non-human amino acid residues are often referred to as “import” residues, which are typically taken from an “import” variable domain. Humanization may be performed, for example, following the method of Jones et al., Nature 321:522-25 (1986); Riechmann et al., Nature 332:323-27 (1988); and Verhoeyen et al., Science 239:1534-36 (1988)), by substituting hypervariable region sequences for the corresponding sequences of a human antibody. In a specific embodiment, humanization of the antibody provided herein is performed as described in Section 6 below.

[0765] In some cases, the humanized antibodies are constructed by CDR grafting, in which the amino acid sequences of the CDRs of the parent non-human antibody are grafted onto a human antibody framework. For example, Padlan et al. determined that only about one third of the residues in the CDRs actually contact the antigen, and termed these the “specificity determining residues,” or SDRs (Padlan et al., FASEB J. 9:133-39 (1995)). In the technique of SDR grafting, only the SDR residues are grafted onto the human antibody framework (see, e.g., Kashmiri et al., Methods 36:25-34 (2005)).

[0766] The choice of human variable domains to be used in making the humanized antibodies can be important to reduce antigenicity. For example, according to the so-called “best-fit” method, the sequence of the variable domain of a non-human antibody is screened against the entire library of known human variable-domain sequences. The human sequence that is closest to that of the non-human antibody may be selected as the human framework for the humanized antibody (Sims et al., J. Immunol. 151:2296-308 (1993); and Chothia et al., J. Mol. Biol. 196:901-17 (1987)). Another method uses a particular framework derived from the consensus sequence of all human antibodies of a particular subgroup of light or heavy chains. The same framework may be used for several different humanized antibodies (Carter et al., Proc. Natl. Acad. Sci. USA 89:4285-89 (1992); and Presta et al., J. Immunol. 151:2623-32 (1993)). In some cases, the framework is derived from the consensus sequences of the most abundant human subclasses, V_{L}6 subgroup I (V_{L}6I) and VH subgroup III (V_{H}III). In another method, human germline genes are used as the source of the framework regions.

[0767] In an alternative paradigm based on comparison of CDRs, called superhumanization, FR homology is irrelevant. The method consists of comparison of the non-human sequence with the functional human germline gene repertoire. Those genes encoding the same or closely related canonical structures to the murine sequences are then selected. Next, within the genes sharing the canonical structures with the non-human antibody, those with highest homology within the CDRs are chosen as FR donors. Finally, the non-human CDRs are grafted onto these FRs (see, e.g., Tan et al., J. Immunol. 169:1119-25 (2002)).

[0768] It is further generally desirable that antibodies be humanized with retention of their affinity for the antigen and other favorable biological properties. To achieve this goal, according to one method, humanized antibodies are prepared by a process of analysis of the parental sequences and various conceptual humanized products using three-dimensional models of the parental and humanized sequences. Three-dimensional immunoglobulin models are commonly available and are familiar to those skilled in the art. Computer programs are available which illustrate and display probable three-dimensional conformational structures of selected candidate immunoglobulin sequences. These include, for example, WAM (Whitelegg and Rees, Protein Eng. 13:819-24 (2002)), Modeller (Sali and Blundell, J. Mol. Biol. 234:779-815 (1993)), and Swiss PDB Viewer (Guex and Peitsch, Electrophoresis 18:2714-23 (1997)). Inspection of these displays permits analysis of the likely role of the residues in the functioning of the candidate immunoglobulin sequence, e.g., the analysis of residues that influence the ability of the candidate immunoglobulin to bind its antigen. In this way, FR residues can be selected and combined from the recipient and import sequences so that the desired antibody characteristic, such as increased affinity for the target antigen(s), is achieved. In general, the hypervariable region residues are directly and most substantially involved in influencing antigen binding.

[0769] Another method for antibody humanization is based on a metric of antibody humanness termed Human String Content (HSC). This method compares the mouse sequence with the repertoire of human germline genes, and the differences are scored as HSC. The target sequence is then humanized by maximizing its HSC rather than using a global identity measure to generate multiple diverse humanized variants (Lazar et al., Mol. Immunol. 44:1986-98 (2007)).

[0770] In addition to the methods described above, empirical methods may be used to generate and select humanized antibodies. These methods include those that are based upon the generation of large libraries of humanized variants and selection of the best clones using enrichment technologies or high throughput screening techniques. Antibody variants may be isolated from phage, ribosome, and yeast display libraries as well as by bacterial colony screening (see, e.g., Hoogenboom, Nat. Biotechnol. 23:1105-16 (2005); Dufner et al., Trends Biotechnol. 24:523-29 (2006); Feldhaus et al., Nat. Biotechnol. 21:163-70 (2003); and Schlapschy et al., Protein Eng. Des. Sel. 17:847-60 (2004)).

[0771] In the FR library approach, a collection of residue variants are introduced at specific positions in the FR followed by screening of the library to select the FR that best supports the grafted CDR. The residues to be substituted may include some or all of the “Vernier” residues identified as potentially contributing to CDR structure (see, e.g., Foote and Winter, J. Mol. Biol. 224:487-99 (1992)), or from the more limited set of target residues identified by Baca et al. J. Biol. Chem. 272:10678-84 (1997).

[0772] In FR shuffling, whole FRs are combined with the non-human CDRs instead of creating combinatorial libraries of selected residue variants (see, e.g., Dall'Acqua et al., Methods 36:43-60 (2005)). A one-step FR shuffling process may be used. Such a process has been shown to be efficient, as the resulting antibodies exhibited improved biochemical and physicochemical properties including enhanced expression, increased affinity, and thermal stability (see, e.g., Damschroder et al., Mol. Immunol. 44:3049-60 (2007)).

[0773] The “humaneering” method is based on experimental identification of essential minimum specificity determinants (MSDs) and is based on sequential replacement of non-human fragments into libraries of human FRs and assessment of binding. This methodology typically results in epitope retention and identification of antibodies from multiple subclasses with distinct human V-segment CDRs.

[0774] The “human engineering” method involves altering a non-human antibody or antibody fragment by making specific changes to the amino acid sequence of the antibody so as to produce a modified antibody with reduced immunogenicity in a human that nonetheless retains the desirable binding properties of the original non-human antibodies. Generally, the technique involves classifying amino acid residues of a non-human antibody as “low risk,” “moderate risk,” or “high risk” residues. The classification is performed using a global risk/reward calculation that evaluates the predicted benefits of making particular substitution (e.g., for immunogenicity in humans) against the risk that the substitution will affect the resulting antibody's folding. The particular human amino acid residue to be substituted at a given position (e.g., low or moderate risk) of a non-human antibody sequence can be selected by aligning an amino acid sequence from the non-human antibody's variable regions with the corresponding region of a specific or consensus human antibody sequence. The amino acid residues at low or moderate risk positions in the non-human sequence can be substituted for the corresponding residues in the human antibody sequence according to the alignment. Techniques for making human engineered proteins are described in greater detail in Studnicka et al., Protein Engineering 7:805-14 (1994); U.S. Pat. Nos. 5,766,886; 5,770,196; 5,821,123; and 5,869,619; and PCT Publication WO 93/11794.

[0775] A composite human antibody can be generated using, for example, Composite Human Antibody™ technology (Antitope Ltd., Cambridge, United Kingdom). To generate composite human antibodies, variable region sequences are designed from fragments of multiple human antibody variable region sequences in a manner that avoids T cell epitopes, thereby minimizing the immunogenicity of the resulting antibody.

[0776] A deimmunized antibody is an antibody in which T-cell epitopes have been removed. Methods for making deimmunized antibodies have been described. See, e.g., Jones et al., Methods Mol Biol. 525:405-23 (2009), xiv, and De Groot et al., Cell. Immunol. 244:148-153(2006)). Deimmunized antibodies comprise T-cell epitope-depleted variable regions and human constant regions. Briefly, variable regions of an antibody are cloned and T-cell epitopes are subsequently identified by testing overlapping peptides derived from the variable regions of the antibody in a T cell proliferation assay. T cell epitopes are identified via in silico methods to identify peptide binding to human MHC class II. Mutations are introduced in the variable regions to abrogate binding to human MHC class II. Mutated variable regions are then utilized to generate the deimmunized antibody.

### Antibody Variants

[0777] In some embodiments, amino acid sequence modification(s) of the antibodies that bind to IL-23R described herein are contemplated. For example, it may be desirable to optimize the binding affinity and/or other biological properties of the antibody, including but not limited to specificity, thermostability, expression level, effector functions, glycosylation, reduced immunogenicity, or solubility. Thus, in addition to the antibodies that bind to IL-23R described herein, it is contemplated that variants of the antibodies that bind to IL-23R described herein can be prepared. For example, antibody variants can be prepared by introducing appropriate nucleotide changes into the encoding DNA, and/or by synthesis of the desired antibody or polypeptide. Those skilled in the art who appreciate that amino acid changes may alter post-translational processes of the antibody.

### Chemical Modifications

[0778] In some embodiments, the antibodies provided herein are chemically modified, for example, by the covalent attachment of any type of molecule to the antibody. The antibody derivatives may include antibodies that have been chemically modified, for example, by glycosylation, acetylation, pegylation, phosphorylation, amidation, derivatization by known protecting/blocking groups, proteolytic cleavage, linkage to a cellular ligand or other protein, or conjugation to one or more immunoglobulin domains (e.g., Fc or a portion of an Fc). Any of numerous chemical modifications may be carried out by known techniques, including, but not limited to, specific chemical cleavage, acetylation, formulation, metabolic synthesis of tunicamycin, etc. Additionally, the antibody may contain one or more non-classical amino acids.

[0779] In some embodiments, an antibody provided herein is altered to increase or decrease the extent to which the antibody is glycosylated. Addition or deletion of glycosylation sites to an antibody may be conveniently accomplished by altering the amino acid sequence such that one or more glycosylation sites is created or removed.

[0780] When the antibody provided herein is fused to an Fc region, the carbohydrate attached thereto may be altered. Native antibodies produced by mammalian cells typically comprise a branched, biantennary oligosaccharide that is generally attached by an N-linkage to Asn297 of the CH2 domain of the Fc region. See, e.g., Wright et al. TIBTECH 15:26-32 (1997). The oligosaccharide may include various carbohydrates, e.g., mannose, N-acetyl glucosamine (GlcNAc), galactose, and sialic acid, as well as a fucose attached to a GlcNAc in the “stem” of the biantennary oligosaccharide structure. In some embodiments, modifications of the oligosaccharide in the binding molecules provided herein may be made in order to create variants with certain improved properties.

[0781] In other embodiments, when the antibody provided herein is fused to an Fc region, antibody variants provided herein may have a carbohydrate structure that lacks fucose attached (directly or indirectly) to said Fc region. For example, the amount of fucose in such antibody may be from 1% to 80%, from 1% to 65%, from 5% to 65% or from 20% to 40%. The amount of fucose is determined by calculating the average amount of fucose within the sugar chain at Asn297, relative to the sum of all glycostructures attached to Asn 297 (e.g., complex, hybrid and high mannose structures) as measured by MALDI-TOF mass spectrometry, as described in WO 2008/077546, for example. Asn297 refers to the asparagine residue located at about position 297 in the Fc region (EU numbering of Fc region residues); however, Asn297 may also be located about ±3 amino acids upstream or downstream of position 297, i.e., between positions 294 and 300, due to minor sequence variations in antibodies. Such fucosylation variants may have improved ADCC function. See, e.g., US Patent Publication Nos. US 2003/0157108 and US 2004/0093621. Examples of publications related to “defucosylated” or “fucose-deficient” antibody variants include: US 2003/0157108; WO 2000/61739; WO 2001/29246; US 2003/0115614; US 2002/0164328; US 2004/0093621; US 2004/0132140; US 2004/0110704; US 2004/0110282; US 2004/0109865; WO 2003/085119; WO 2003/084570; WO 2005/035586; WO 2005/035778; WO2005/053742; WO2002/031140; Okazaki et al. J. Mol. Biol. 336:1239-1249 (2004); Yamane-Ohnuki et al. Biotech. Bioeng. 87: 614 (2004). Examples of cell lines capable of producing defucosylated antibodies include Lec13 CHO cells deficient in protein fucosylation (Ripka et al. Arch. Biochem. Biophys. 249:533-545 (1986); US Patent Application No. US 2003/0157108; and WO 2004/056312, and knockout cell lines, such as alpha-1,6-fucosyltransferase gene, FUT8, knockout CHO cells (see, e.g., Yamane-Ohnuki et al. Biotech. Bioeng. 87: 614 (2004); Kanda, Y. et al., Biotechnol. Bioeng., 94(4):680-688 (2006); and WO2003/085107).

[0782] The binding molecules comprising an antibody provided herein are further provided with bisected oligosaccharides, e.g., in which a biantennary oligosaccharide attached to the Fc region is bisected by GlcNAc. Such variants may have reduced fucosylation and/or improved ADCC function. Examples of such variants are described, e.g., in WO 2003/011878 (Jean-Mairet et al.); U.S. Pat. No. 6,602,684 (Umana et al.); and US 2005/0123546 (Umana et al.). Variants with at least one galactose residue in the oligosaccharide attached to the Fc region are also provided. Such variants may have improved CDC function. Such variants are described, e.g., in WO 1997/30087; WO 1998/58964; and WO 1999/22764.

[0783] In molecules that comprise the present antibody and an Fc region, one or more amino acid modifications may be introduced into the Fc region, thereby generating an Fc region variant. The Fc region variant may comprise a human Fc region sequence (e.g., a human IgG1, IgG2, IgG3 or IgG4 Fc region) comprising an amino acid modification (e.g. a substitution) at one or more amino acid positions.

[0784] In some embodiments, the present application contemplates variants that possesses some but not all effector functions, which make it a desirable candidate for applications in which the half-life of the binding molecule in vivo is important yet certain effector functions (such as complement and ADCC) are unnecessary or deleterious. In vitro and/or in vivo cytotoxicity assays can be conducted to confirm the reduction/depletion of CDC and/or ADCC activities. For example, Fc receptor (FcR) binding assays can be conducted to ensure that the binding molecule lacks FcγR binding (hence likely lacking ADCC activity), but retains FcRn binding ability. Non-limiting examples of in vitro assays to assess ADCC activity of a molecule of interest is described in U.S. Pat. No. 5,500,362 (see, e.g. Hellstrom, I. et al. Proc. Nat'l Acad. Sci. USA 83:7059-7063 (1986)) and Hellstrom, I et al., Proc. Nat'l Acad. Sci. USA 82:1499-1502 (1985); 5,821,337 (see Bruggemann, M. et al., J. Exp. Med. 166:1351-1361 (1987)). Alternatively, non-radioactive assays methods may be employed (see, for example, ACTI™ non-radioactive cytotoxicity assay for flow cytometry (CellTechnology, Inc. Mountain View, CA; and CytoTox 96© non-radioactive cytotoxicity assay (Promega, Madison, WI). Useful effector cells for such assays include peripheral blood mononuclear cells (PBMC) and Natural Killer (NK) cells. Alternatively, or additionally, ADCC activity of the molecule of interest may be assessed in vivo, e.g., in an animal model such as that disclosed in Clynes et al. Proc. Nat'l Acad. Sci. USA 95:652-656 (1998). C1q binding assays may also be carried out to confirm that the antibody is unable to bind C1q and hence lacks CDC activity. See, e.g., C1q and C3c binding ELISA in WO 2006/029879 and WO 2005/100402. To assess complement activation, a CDC assay may be performed (see, for example, Gazzano-Santoro et al., J. Immunol. Methods 202:163 (1996); Cragg, M. S. et al., Blood 101:1045-1052 (2003); and Cragg, M. S. and M. J. Glennie, Blood 103:2738-2743 (2004)). FcRn binding and in vivo clearance/half life determinations can also be performed using methods known in the art (see, e.g., Petkova, S. B. et al., Int'l. Immunol. 18(12):1759-1769 (2006)).

[0785] Binding molecules with reduced effector function include those with substitution of one or more of Fc region residues 238, 265, 269, 270, 297, 327 and 329 (U.S. Pat. No. 6,737,056). Such Fc mutants include Fc mutants with substitutions at two or more of amino acid positions 265, 269, 270, 297 and 327, including the so-called “DANA” Fc mutant with substitution of residues 265 and 297 to alanine (U.S. Pat. No. 7,332,581).

[0786] Certain variants with improved or diminished binding to FcRs are described. (See, e.g., U.S. Pat. No. 6,737,056; WO 2004/056312, and Shields et al., J. Biol. Chem. 9(2): 6591-6604 (2001).)

[0787] In some embodiments, a variant comprises an Fc region with one or more amino acid substitutions which improve ADCC, e.g., substitutions at positions 298, 333, and/or 334 of the Fc region (EU numbering of residues). In some embodiments, alterations are made in the Fc region that result in altered (i.e., either improved or diminished) C1q binding and/or Complement Dependent Cytotoxicity (CDC), e.g., as described in U.S. Pat. No. 6,194,551, WO 99/51642, and Idusogie et al. J. Immunol. 164: 4178-4184 (2000).

[0788] Binding molecules with increased half lives and improved binding to the neonatal Fc receptor (FcRn), which is responsible for the transfer of maternal IgGs to the fetus (Guyer et al., J. Immunol. 117:587 (1976) and Kim et al., J. Immunol. 24:249 (1994)), are described in US2005/0014934A1 (Hinton et al.). Those molecules comprise an Fc region with one or more substitutions therein which improve binding of the Fc region to FcRn. Such Fc variants include those with substitutions at one or more of Fc region residues: 238, 256, 265, 272, 286, 303, 305, 307, 311, 312, 317, 340, 356, 360, 362, 376, 378, 380, 382, 413, 424 or 434, e.g., substitution of Fc region residue 434 (U.S. Pat. No. 7,371,826). See also Duncan & Winter, Nature 322:738-40 (1988); U.S. Pat. Nos. 5,648,260; 5,624,821; and WO 94/29351 concerning other examples of Fc region variants.

[0789] In some embodiments, it may be desirable to create cysteine engineered antibodies, in which one or more residues of an antibody are substituted with cysteine residues. In some embodiments, the substituted residues occur at accessible sites of the antibody. By substituting those residues with cysteine, reactive thiol groups are thereby positioned at accessible sites of the antibody and may be used to conjugate the antibody to other moieties, such as drug moieties or linker-drug moieties, to create an immunoconjugate, as described further herein.

### Substitutions, Deletions, or Insertions

[0790] Variations may be a substitution, deletion, or insertion of one or more codons encoding the antibody or polypeptide that results in a change in the amino acid sequence as compared with the original antibody or polypeptide. Sites of interest for substitutional mutagenesis include the CDRs and FRs.

[0791] Amino acid substitutions can be the result of replacing one amino acid with another amino acid having similar structural and/or chemical properties, such as the replacement of a leucine with a serine, e.g., conservative amino acid replacements. Standard techniques known to those of skill in the art can be used to introduce mutations in the nucleotide sequence encoding a molecule provided herein, including, for example, site-directed mutagenesis and PCR-mediated mutagenesis which results in amino acid substitutions. Insertions or deletions may optionally be in the range of about 1 to 5 amino acids. In certain embodiments, the substitution, deletion, or insertion includes fewer than 25 amino acid substitutions, fewer than 20 amino acid substitutions, fewer than 15 amino acid substitutions, fewer than 10 amino acid substitutions, fewer than 5 amino acid substitutions, fewer than 4 amino acid substitutions, fewer than 3 amino acid substitutions, or fewer than 2 amino acid substitutions relative to the original molecule. In a specific embodiment, the substitution is a conservative amino acid substitution made at one or more predicted non-essential amino acid residues. The variation allowed may be determined by systematically making insertions, deletions, or substitutions of amino acids in the sequence and testing the resulting variants for activity exhibited by the parental antibodies.

[0792] Amino acid sequence insertions include amino- and/or carboxyl-terminal fusions ranging in length from one residue to polypeptides containing multiple residues, as well as intrasequence insertions of single or multiple amino acid residues. Examples of terminal insertions include an antibody with an N-terminal methionyl residue.

[0793] Antibodies generated by conservative amino acid substitutions are included in the present disclosure. In a conservative amino acid substitution, an amino acid residue is replaced with an amino acid residue having a side chain with a similar charge. As described above, families of amino acid residues having side chains with similar charges have been defined in the art. These families include amino acids with basic side chains (e.g., lysine, arginine, histidine), acidic side chains (e.g., aspartic acid, glutamic acid), uncharged polar side chains (e.g., glycine, asparagine, glutamine, serine, threonine, tyrosine, cysteine), nonpolar side chains (e.g., alanine, valine, leucine, isoleucine, proline, phenylalanine, methionine, tryptophan), beta-branched side chains (e.g., threonine, valine, isoleucine) and aromatic side chains (e.g., tyrosine, phenylalanine, tryptophan, histidine). Alternatively, mutations can be introduced randomly along all or part of the coding sequence, such as by saturation mutagenesis, and the resultant mutants can be screened for biological activity to identify mutants that retain activity. Following mutagenesis, the encoded protein can be expressed and the activity of the protein can be determined. Conservative (e.g., within an amino acid group with similar properties and/or side chains) substitutions may be made, so as to maintain or not significantly change the properties. Exemplary substitutions are shown in Table 2 below.

TABLE 2
Amino Acid Substitutions

| Original | Exemplary |
|---|---|
| Residue | Substitutions |
| Ala (A) | Val; Leu; Ile |
| Arg (R) | Lys; Gln; Asn |
| Asn (N) | Gln; His; Asp, Lys; Arg |
| Asp (D) | Glu; Asn |
| Cys (C) | Ser; Ala |
| Gln (Q) | Asn; Glu |
| Glu (E) | Asp; Gln |
| Gly (G) | Ala |
| His (H) | Asn; Gln; Lys; Arg |
| Ile (I) | Leu; Val; Met; Ala; Phe; |
| | Norleucine |
| Leu (L) | Norleucine; Ile; Val; Met; Ala; |
| | Phe |
| Lys (K) | Arg; Gln; Asn |
| Met (M) | Leu; Phe; Ile |
| Phe (F) | Trp; Leu; Val; Ile; Ala; Tyr |
| Pro (P) | Ala |
| Ser (S) | Thr |
| Thr (T) | Val; Ser |
| Trp (W) | Tyr; Phe |
| Tyr (Y) | Trp; Phe; Thr; Ser |
| Val (V) | Ile; Leu; Met; Phe; Ala; |
| | Norleucine |

[0794] Amino acids may be grouped according to similarities in the properties of their side chains (see, e.g., Lehninger, Biochemistry 73-75 (2d ed. 1975)): (1) non-polar: Ala (A), Val (V), Leu (L), Ile (I), Pro (P), Phe (F), Trp (W), Met (M); (2) uncharged polar: Gly (G), Ser (S), Thr (T), Cys (C), Tyr (Y), Asn (N), Gln (Q); (3) acidic: Asp (D), Glu (E); and (4) basic: Lys (K), Arg (R), His(H). Alternatively, naturally occurring residues may be divided into groups based on common side-chain properties: (1) hydrophobic: Norleucine, Met, Ala, Val, Leu, Ile; (2) neutral hydrophilic: Cys, Ser, Thr, Asn, Gln; (3) acidic: Asp, Glu; (4) basic: His, Lys, Arg; (5) residues that influence chain orientation: Gly, Pro; and (6) aromatic: Trp, Tyr, Phe. For example, any cysteine residue not involved in maintaining the proper conformation of the antibody also may be substituted, for example, with another amino acid, such as alanine or serine, to improve the oxidative stability of the molecule and to prevent aberrant crosslinking. Non-conservative substitutions will entail exchanging a member of one of these classes for another class.

[0795] One type of substitutional variant involves substituting one or more hypervariable region residues of a parent antibody (e.g., a humanized or human antibody). Generally, the resulting variant(s) selected for further study will have modifications (e.g., improvements) in certain biological properties (e.g., increased affinity, reduced immunogenicity) relative to the parent antibody and/or will have substantially retained certain biological properties of the parent antibody. An exemplary substitutional variant is an affinity matured antibody, which may be conveniently generated, e.g., using phage display-based affinity maturation techniques such as those described herein. Briefly, one or more CDR residues are mutated and the variant antibodies displayed on phage and screened for a particular biological activity (e.g. binding affinity).

[0796] Alterations (e.g., substitutions) may be made in CDRs, e.g., to improve antibody affinity. Such alterations may be made in CDR “hotspots,” i.e., residues encoded by codons that undergo mutation at high frequency during the somatic maturation process (see, e.g., Chowdhury, Methods Mol. Biol. 207:179-196 (2008)), and/or SDRs (a-CDRs), with the resulting variant antibody or fragment thereof being tested for binding affinity. Affinity maturation by constructing and reselecting from secondary libraries has been described, e.g., in Hoogenboom et al. in Methods in Molecular Biology 178:1-37 (O'Brien et al., ed., Human Press, Totowa, NJ, (2001).) In some embodiments of affinity maturation, diversity is introduced into the variable genes chosen for maturation by any of a variety of methods (e.g., error-prone PCR, chain shuffling, or oligonucleotide-directed mutagenesis). A secondary library is then created. The library is then screened to identify any antibody variants with the desired affinity. Another method to introduce diversity involves CDR-directed approaches, in which several CDR residues (e.g., 4-6 residues at a time) are randomized. CDR residues involved in antigen binding may be specifically identified, e.g., using alanine scanning mutagenesis or modeling. More detailed description regarding affinity maturation is provided in the section below.

[0797] In some embodiments, substitutions, insertions, or deletions may occur within one or more CDRs so long as such alterations do not substantially reduce the ability of the antibody to bind antigen. For example, conservative alterations (e.g., conservative substitutions as provided herein) that do not substantially reduce binding affinity may be made in CDRs. In some embodiments of the variant antibody sequences provided herein, each CDR either is unaltered, or contains no more than one, two or three amino acid substitutions.

[0798] A useful method for identification of residues or regions of an antibody that may be targeted for mutagenesis is called “alanine scanning mutagenesis” as described by Cunningham and Wells, Science, 244:1081-1085 (1989). In this method, a residue or group of target residues (e.g., charged residues such as Arg, Asp, His, Lys, and Glu) are identified and replaced by a neutral or negatively charged amino acid (e.g., alanine or polyalanine) to determine whether the interaction of the antibody with antigen is affected. Further substitutions may be introduced at the amino acid locations demonstrating functional sensitivity to the initial substitutions. Alternatively, or additionally, a crystal structure of an antigen-antibody complex to identify contact points between the antibody and antigen. Such contact residues and neighboring residues may be targeted or eliminated as candidates for substitution. Variants may be screened to determine whether they contain the desired properties.

[0799] Amino acid sequence insertions include amino- and/or carboxyl-terminal fusions ranging in length from one residue to polypeptides containing a hundred or more residues, as well as intrasequence insertions of single or multiple amino acid residues. Examples of terminal insertions include an antibody with an N-terminal methionyl residue. Other insertional variants of the antibody molecule include the fusion to the N- or C-terminus of the antibody to an enzyme (e.g., for ADEPT) or a polypeptide which increases the serum half-life of the antibody.

[0800] The variations can be made using methods known in the art such as oligonucleotide-mediated (site-directed) mutagenesis, alanine scanning, and PCR mutagenesis. Site-directed mutagenesis (see, e.g., Carter, Biochem J. 237:1-7 (1986); and Zoller et al., Nucl. Acids Res. 10:6487-500 (1982)), cassette mutagenesis (see, e.g., Wells et al., Gene 34:315-23 (1985)), or other known techniques can be performed on the cloned DNA to produce the antibody variant DNA.

In vitro Affinity Maturation

[0801] In some embodiments, antibody variants having an improved property such as affinity, stability, or expression level as compared to a parent antibody may be prepared by in vitro affinity maturation. Like the natural prototype, in vitro affinity maturation is based on the principles of mutation and selection. Libraries of antibodies are displayed on the surface of an organism (e.g., phage, bacteria, yeast, or mammalian cell) or in association (e.g., covalently or non-covalently) with their encoding mRNA or DNA. Affinity selection of the displayed antibodies allows isolation of organisms or complexes carrying the genetic information encoding the antibodies. Two or three rounds of mutation and selection using display methods such as phage display usually results in antibody fragments with affinities in the low nanomolar range. Affinity matured antibodies can have nanomolar or even picomolar affinities for the target antigen.

[0802] Phage display is a widespread method for display and selection of antibodies. The antibodies are displayed on the surface of Fd or M13 bacteriophages as fusions to the bacteriophage coat protein. Selection involves exposure to antigen to allow phage-displayed antibodies to bind their targets, a process referred to as “panning.” Phage bound to antigen are recovered and used to infect bacteria to produce phage for further rounds of selection. For review, see, for example, Hoogenboom, Methods. Mol. Biol. 178:1-37 (2002); and Bradbury and Marks, J. Immunol. Methods 290:29-49 (2004).

[0803] In a yeast display system (see, e.g., Boder et al., Nat. Biotech. 15:553-57 (1997); and Chao et al., Nat. Protocols 1:755-68 (2006)), the antibody may be fused to the adhesion subunit of the yeast agglutinin protein Aga2p, which attaches to the yeast cell wall through disulfide bonds to Agalp. Display of a protein via Aga2p projects the protein away from the cell surface, minimizing potential interactions with other molecules on the yeast cell wall. Magnetic separation and flow cytometry are used to screen the library to select for antibodies with improved affinity or stability. Binding to a soluble antigen of interest is determined by labeling of yeast with biotinylated antigen and a secondary reagent such as streptavidin conjugated to a fluorophore. Variations in surface expression of the antibody can be measured through immunofluorescence labeling of either the hemagglutinin or c-Myc epitope tag flanking the single chain antibody (e.g., scFv). Expression has been shown to correlate with the stability of the displayed protein, and thus antibodies can be selected for improved stability as well as affinity (see, e.g., Shusta et al., J. Mol. Biol. 292:949-56 (1999)). An additional advantage of yeast display is that displayed proteins are folded in the endoplasmic reticulum of the eukaryotic yeast cells, taking advantage of endoplasmic reticulum chaperones and quality-control machinery. Once maturation is complete, antibody affinity can be conveniently “titrated” while displayed on the surface of the yeast, eliminating the need for expression and purification of each clone. A theoretical limitation of yeast surface display is the potentially smaller functional library size than that of other display methods; however, a recent approach uses the yeast cells' mating system to create combinatorial diversity estimated to be 10¹⁴ in size (see, e.g., U.S. Pat. Publication 2003/0186374; and Blaise et al., Gene 342:211-18 (2004)).

[0804] In ribosome display, antibody-ribosome-mRNA (ARM) complexes are generated for selection in a cell-free system. The DNA library coding for a particular library of antibodies is genetically fused to a spacer sequence lacking a stop codon. This spacer sequence, when translated, is still attached to the peptidyl tRNA and occupies the ribosomal tunnel, and thus allows the protein of interest to protrude out of the ribosome and fold. The resulting complex of mRNA, ribosome, and protein can bind to surface-bound ligand, allowing simultaneous isolation of the antibody and its encoding mRNA through affinity capture with the ligand. The ribosome-bound mRNA is then reverse transcribed back into cDNA, which can then undergo mutagenesis and be used in the next round of selection (see, e.g., Fukuda et al., Nucleic Acids Res. 34:e127 (2006)). In mRNA display, a covalent bond between antibody and mRNA is established using puromycin as an adaptor molecule (Wilson et al., Proc. Natl. Acad. Sci. USA 98:3750-55 (2001)).

[0805] As these methods are performed entirely in vitro, they provide two main advantages over other selection technologies. First, the diversity of the library is not limited by the transformation efficiency of bacterial cells, but only by the number of ribosomes and different mRNA molecules present in the test tube. Second, random mutations can be introduced easily after each selection round, for example, by non-proofreading polymerases, as no library must be transformed after any diversification step.

[0806] In some embodiments, mammalian display systems may be used.

[0807] Diversity may also be introduced into the CDRs of the antibody libraries in a targeted manner or via random introduction. The former approach includes sequentially targeting all the CDRs of an antibody via a high or low level of mutagenesis or targeting isolated hot spots of somatic hypermutations (see, e.g., Ho et al., J. Biol. Chem. 280:607-17 (2005)) or residues suspected of affecting affinity on experimental basis or structural reasons. Diversity may also be introduced by replacement of regions that are naturally diverse via DNA shuffling or similar techniques (see, e.g., Lu et al., J. Biol. Chem. 278:43496-507 (2003); U.S. Pat. Nos. 5,565,332 and 6,989,250). Alternative techniques target hypervariable loops extending into framework-region residues (see, e.g., Bond et al., J. Mol. Biol. 348:699-709 (2005)) employ loop deletions and insertions in CDRs or use hybridization-based diversification (see, e.g., U.S. Pat. Publication No. 2004/0005709). Additional methods of generating diversity in CDRs are disclosed, for example, in U.S. Pat. No. 7,985,840. Further methods that can be used to generate antibody libraries and/or antibody affinity maturation are disclosed, e.g., in U.S. Pat. Nos. 8,685,897 and 8,603,930, and U.S. Publ. Nos. 2014/0170705, 2014/0094392, 2012/0028301, 2011/0183855, and 2009/0075378, each of which are incorporated herein by reference.

[0808] Screening of the libraries can be accomplished by various techniques known in the art. For example, antibodies can be immobilized onto solid supports, columns, pins, or cellulose/poly (vinylidene fluoride) membranes/other filters, expressed on host cells affixed to adsorption plates or used in cell sorting, or conjugated to biotin for capture with streptavidin-coated beads or used in any other method for panning display libraries.

[0809] For review of in vitro affinity maturation methods, see, e.g., Hoogenboom, Nature Biotechnology 23:1105-16 (2005); Quiroz and Sinclair, Revista Ingeneria Biomedia 4:39-51 (2010); and references therein.

### Modifications of Antibodies

[0810] Covalent modifications of antibodies are included within the scope of the present disclosure. Covalent modifications include reacting targeted amino acid residues of an antibody with an organic derivatizing agent that is capable of reacting with selected side chains or the N- or C-terminal residues of the antibody. Other modifications include deamidation of glutaminyl and asparaginyl residues to the corresponding glutamyl and aspartyl residues, respectively, hydroxylation of proline and lysine, phosphorylation of hydroxyl groups of seryl or threonyl residues, methylation of the α-amino groups of lysine, arginine, and histidine side chains (see, e.g., Creighton, Proteins: Structure and Molecular Properties 79-86 (1983)), acetylation of the N-terminal amine, and amidation of any C-terminal carboxyl group.

[0811] Other types of covalent modification of the antibody included within the scope of this present disclosure include altering the native glycosylation pattern of the antibody or polypeptide as described above (see, e.g., Beck et al., Curr. Pharm. Biotechnol. 9:482-501 (2008); and Walsh, Drug Discov. Today 15:773-80 (2010)), and linking the antibody to one of a variety of nonproteinaceous polymers, e.g., polyethylene glycol (PEG), polypropylene glycol, or polyoxyalkylenes, in the manner set forth, for example, in U.S. Pat. Nos. 4,640,835; 4,496,689; 4,301,144; 4,670,417; 4,791,192; or 4,179,337. The antibody that binds to IL-23R of the disclosure may also be genetically fused or conjugated to one or more immunoglobulin constant regions or portions thereof (e.g., Fc) to extend half-life and/or to impart known Fc-mediated effector functions.

[0812] The antibody that binds to IL-23R of the present disclosure may also be modified to form chimeric molecules comprising the antibody that binds to IL-23R fused to another, heterologous polypeptide or amino acid sequence, for example, an epitope tag (see, e.g., Terpe, Appl. Microbiol. Biotechnol. 60:523-33 (2003)) or the Fc region of an IgG molecule (see, e.g., Aruffo, Antibody Fusion Proteins 221-42 (Chamow and Ashkenazi eds., 1999)).

[0813] Also provided herein are fusion proteins comprising the antibody that binds to IL-23R of the disclosure and a heterologous polypeptide. In some embodiments, the heterologous polypeptide to which the antibody is genetically fused or chemically conjugated is useful for targeting the antibody to cells having cell surface-expressed IL-23R.

[0814] Also provided herein are panels of antibodies that bind to an IL-23R antigen. In specific embodiments, the panels of antibodies have different association rates, different dissociation rates, different affinities for an IL-23R antigen, and/or different specificities for an IL-23R antigen. In some embodiments, the panels comprise or consist of about 10 to about 1000 antibodies or more. Panels of antibodies can be used, for example, in 96-well or 384-well plates, for assays such as ELISAs.

### Other Binding Molecules Comprising the Antibodies

[0815] In another aspect, provided herein is a binding molecule comprising an anti-IL-23R antibody provided herein. In some embodiments, an antibody against IL-23R provided herein is part of other binding molecules. Exemplary binding molecules of the present disclosure are described herein.

### Fusion Protein

[0816] In various embodiments, the antibody provided herein can be genetically fused or chemically conjugated to another agent, for example, protein-based entities. The antibody may be chemically-conjugated to the agent, or otherwise non-covalently conjugated to the agent. The agent can be a peptide or antibody (or a fragment thereof).

[0817] Thus, in some embodiments, provided herein are antibodies that are recombinantly fused or chemically conjugated (covalent or non-covalent conjugations) to a heterologous protein or polypeptide (or fragment thereof, for example, to a polypeptide of about 10, about 20, about 30, about 40, about 50, about 60, about 70, about 80, about 90, about 100, about 150, about 200, about 250, about 300, about 350, about 400, about 450 or about 500 amino acids, or over 500 amino acids) to generate fusion proteins, as well as uses thereof. In particular, provided herein are fusion proteins comprising an antigen binding fragment of the antibody provided herein (e.g., CDR1, CDR2, and/or CDR3) and a heterologous protein, polypeptide, or peptide.

[0818] Moreover, antibodies provided herein can be fused to marker or “tag” sequences, such as a peptide, to facilitate purification. In specific embodiments, the marker or tag amino acid sequence is a hexa-histidine peptide, hemagglutinin (“HA”) tag, and “FLAG” tag.

[0819] Methods for fusing or conjugating moieties (including polypeptides) to antibodies are known (see, e.g., Arnon et al., Monoclonal Antibodies for Immunotargeting of Drugs in Cancer Therapy, in Monoclonal Antibodies and Cancer Therapy 243-56 (Reisfeld et al. eds., 1985); Hellstrom et al., Antibodies for Drug Delivery, in Controlled Drug Delivery 623-53 (Robinson et al. eds., 2d ed. 1987); Thorpe, Antibody Carriers of Cytotoxic Agents in Cancer Therapy: A Review, in Monoclonal Antibodies: Biological and Clinical Applications 475-506 (Pinchera et al. eds., 1985); Analysis, Results, and Future Prospective of the Therapeutic Use of Radiolabeled Antibody in Cancer Therapy, in Monoclonal Antibodies for Cancer Detection and Therapy 303-16 (Baldwin et al. eds., 1985); Thorpe et al., Immunol. Rev. 62:119-58 (1982); U.S. Pat. Nos. 5,336,603; 5,622,929; 5,359,046; 5,349,053; 5,447,851; 5,723,125; 5,783,181; 5,908,626; 5,844,095; and 5,112,946; EP 307,434; EP 367,166; EP 394,827; PCT publications WO 91/06570, WO 96/04388, WO 96/22024, WO 97/34631, and WO 99/04813; Ashkenazi et al., Proc. Natl. Acad. Sci. USA, 88: 10535-39 (1991); Traunecker et al., Nature, 331:84-86 (1988); Zheng et al., J. Immunol. 154:5590-600 (1995); and Vil et al., Proc. Natl. Acad. Sci. USA 89:11337-41 (1992)).

[0820] Fusion proteins may be generated, for example, through the techniques of gene-shuffling, motif-shuffling, exon-shuffling, and/or codon-shuffling (collectively referred to as “DNA shuffling”). DNA shuffling may be employed to alter the activities of the antibodies as provided herein, including, for example, antibodies with higher affinities and lower dissociation rates (see, e.g., U.S. Pat. Nos. 5,605,793; 5,811,238; 5,830,721; 5,834,252; and U.S. Pat. No. 5,837,458; Patten et al., Curr. Opinion Biotechnol. 8:724-33 (1997); Harayama, Trends Biotechnol. 16(2):76-82 (1998); Hansson et al., J. Mol. Biol. 287:265-76 (1999); and Lorenzo and Blasco, Biotechniques 24(2):308-13 (1998)). Antibodies, or the encoded antibodies, may be altered by being subjected to random mutagenesis by error-prone PCR, random nucleotide insertion, or other methods prior to recombination. A polynucleotide encoding an antibody provided herein may be recombined with one or more components, motifs, sections, parts, domains, fragments, etc. of one or more heterologous molecules.

[0821] In some embodiments, an antibody provided herein is conjugated to a second antibody to form an antibody heteroconjugate.

[0822] In various embodiments, the antibody is genetically fused to the agent. Genetic fusion may be accomplished by placing a linker (e.g., a polypeptide) between the antibody and the agent. The linker may be a flexible linker.

[0823] In various embodiments, the antibody is genetically conjugated to a therapeutic molecule, with a hinge region linking the antibody to the therapeutic molecule.

[0824] Also provided herein are methods for making the various fusion proteins provided herein. The various methods described in Section 5.4 may also be utilized to make the fusion proteins provided herein.

[0825] In a specific embodiment, the fusion protein provided herein is recombinantly expressed. Recombinant expression of a fusion protein provided herein may require construction of an expression vector containing a polynucleotide that encodes the protein or a fragment thereof. Once a polynucleotide encoding a protein provided herein or a fragment thereof has been obtained, the vector for the production of the molecule may be produced by recombinant DNA technology using techniques well-known in the art. Thus, methods for preparing a protein by expressing a polynucleotide containing an encoding nucleotide sequence are described herein. Methods which are well known to those skilled in the art can be used to construct expression vectors containing coding sequences and appropriate transcriptional and translational control signals. These methods include, for example, in vitro recombinant DNA techniques, synthetic techniques, and in vivo genetic recombination. Also provided are replicable vectors comprising a nucleotide sequence encoding a fusion protein provided herein, or a fragment thereof, or a CDR, operably linked to a promoter.

[0826] The expression vector can be transferred to a host cell by conventional techniques and the transfected cells are then cultured by conventional techniques to produce a fusion protein provided herein. Thus, also provided herein are host cells containing a polynucleotide encoding a fusion protein provided herein or fragments thereof operably linked to a heterologous promoter.

[0827] A variety of host-expression vector systems may be utilized to express the fusion protein provided herein. Such host-expression systems represent vehicles by which the coding sequences of interest may be produced and subsequently purified, but also represent cells which may, when transformed or transfected with the appropriate nucleotide coding sequences, express a fusion protein provided herein in situ. These include but are not limited to microorganisms such as bacteria (e.g., E. coli and B. subtilis) transformed with recombinant bacteriophage DNA, plasmid DNA or cosmid DNA expression vectors containing coding sequences; yeast (e.g., Saccharomyces Pichia) transformed with recombinant yeast expression vectors containing coding sequences; insect cell systems infected with recombinant virus expression vectors (e.g., baculovirus) containing coding sequences; plant cell systems infected with recombinant virus expression vectors (e.g., cauliflower mosaic virus, CaMV, tobacco mosaic virus, TMV) or transformed with recombinant plasmid expression vectors (e.g., Ti plasmid) containing coding sequences; or mammalian cell systems (e.g., COS, CHO, BHK, 293, NS0, and 3T3 cells) harboring recombinant expression constructs containing promoters derived from the genome of mammalian cells (e.g., metallothionein promoter) or from mammalian viruses (e.g., the adenovirus late promoter; the vaccinia virus 7.5K promoter). Bacterial cells such as Escherichia coli, or, eukaryotic cells, especially for the expression of whole recombinant antibody molecule, can be used for the expression of a recombinant fusion protein. For example, mammalian cells such as Chinese hamster ovary cells (CHO), in conjunction with a vector such as the major intermediate early gene promoter element from human cytomegalovirus is an effective expression system for antibodies or variants thereof. In a specific embodiment, the expression of nucleotide sequences encoding the fusion proteins provided herein is regulated by a constitutive promoter, inducible promoter or tissue specific promoter.

[0828] In bacterial systems, a number of expression vectors may be advantageously selected depending upon the use intended for the fusion protein being expressed. For example, when a large quantity of such a fusion protein is to be produced, for the generation of pharmaceutical compositions of a fusion protein, vectors which direct the expression of high levels of fusion protein products that are readily purified may be desirable. Such vectors include, but are not limited to, the E. coli expression vector pUR278 (Ruther et al., EMBO 12:1791 (1983)), in which the coding sequence may be ligated individually into the vector in frame with the lac Z coding region so that a fusion protein is produced; pIN vectors (Inouye & Inouye, Nucleic Acids Res. 13:3101-3109 (1985); Van Heeke & Schuster, J. Biol. Chem. 24:5503-5509 (1989)); and the like. pGEX vectors may also be used to express foreign polypeptides as fusion proteins with glutathione 5-transferase (GST). In general, such fusion proteins are soluble and can easily be purified from lysed cells by adsorption and binding to matrix glutathione agarose beads followed by elution in the presence of free glutathione. The pGEX vectors are designed to include thrombin or factor Xa protease cleavage sites so that the cloned target gene product can be released from the GST moiety.

[0829] In mammalian host cells, a number of viral-based expression systems may be utilized. In cases where an adenovirus is used as an expression vector, the coding sequence of interest may be ligated to an adenovirus transcription/translation control complex, e.g., the late promoter and tripartite leader sequence. This chimeric gene may then be inserted in the adenovirus genome by in vitro or in vivo recombination. Insertion in a non-essential region of the viral genome (e.g., region E1 or E3) will result in a recombinant virus that is viable and capable of expressing the fusion protein in infected hosts (e.g., see Logan & Shenk, Proc. Natl. Acad. Sci. USA 8 1:355-359 (1984)). Specific initiation signals may also be required for efficient translation of inserted coding sequences. These signals include the ATG initiation codon and adjacent sequences. Furthermore, the initiation codon must be in phase with the reading frame of the desired coding sequence to ensure translation of the entire insert. These exogenous translational control signals and initiation codons can be of a variety of origins, both natural and synthetic. The efficiency of expression may be enhanced by the inclusion of appropriate transcription enhancer elements, transcription terminators, etc. (see, e.g., Bittner et al., Methods in Enzymol. 153:51-544 (1987)).

[0830] In addition, a host cell strain may be chosen which modulates the expression of the inserted sequences, or modifies and processes the gene product in the specific fashion desired. Such modifications (e.g., glycosylation) and processing (e.g., cleavage) of protein products may be important for the function of the protein. Different host cells have characteristic and specific mechanisms for the post-translational processing and modification of proteins and gene products. Appropriate cell lines or host systems can be chosen to ensure the correct modification and processing of the foreign protein expressed. To this end, eukaryotic host cells which possess the cellular machinery for proper processing of the primary transcript, glycosylation, and phosphorylation of the gene product may be used. Such mammalian host cells include but are not limited to CHO, VERY, BHK, Hela, COS, MDCK, 293, 3T3, W138, BT483, Hs578T, HTB2, BT20 and T47D, NS0 (a murine myeloma cell line that does not endogenously produce any immunoglobulin chains), CRL7030 and HsS78Bst cells.

[0831] For long-term, high-yield production of recombinant proteins, stable expression can be utilized. For example, cell lines which stably express the fusion proteins may be engineered. Rather than using expression vectors which contain viral origins of replication, host cells can be transformed with DNA controlled by appropriate expression control elements (e.g., promoter, enhancer, sequences, transcription terminators, polyadenylation sites, etc.), and a selectable marker. Following the introduction of the foreign DNA, engineered cells may be allowed to grow for 1-2 days in an enriched media, and then are switched to a selective media. The selectable marker in the recombinant plasmid confers resistance to the selection and allows cells to stably integrate the plasmid into their chromosomes and grow to form foci which in turn can be cloned and expanded into cell lines. This method may advantageously be used to engineer cell lines which express the fusion protein. Such engineered cell lines may be particularly useful in screening and evaluation of compositions that interact directly or indirectly with the binding molecule.

[0832] A number of selection systems may be used, including but not limited to, the herpes simplex virus thymidine kinase (Wigler et al., Cell 11:223 (1977)), hypoxanthineguanine phosphoribosyltransferase (Szybalska & Szybalski, Proc. Natl. Acad. Sci. USA 48:202 (1992)), and adenine phosphoribosyltransferase (Lowy et al., Cell 22:8-17 (1980)) genes can be employed in tk-, hgprt- or aprt-cells, respectively. Also, antimetabolite resistance can be used as the basis of selection for the following genes: dhfr, which confers resistance to methotrexate (Wigler et al., Natl. Acad. Sci. USA 77:357 (1980); O'Hare et al., Proc. Natl. Acad. Sci. USA 78:1527 (1981)); gpt, which confers resistance to mycophenolic acid (Mulligan & Berg, Proc. Natl. Acad. Sci. USA 78:2072 (1981)); neo, which confers resistance to the aminoglycoside G-418 (Wu and Wu, Biotherapy 3:87-95 (1991); Tolstoshev, Ann. Rev. Pharmacol. Toxicol. 32:573-596 (1993); Mulligan, Science 260:926-932 (1993); and Morgan and Anderson, Ann. Rev. Biochem. 62:191-217 (1993); May, TIB TECH 11(5):155-2 15 (1993)); and hygro, which confers resistance to hygromycin (Santerre et al., Gene 30:147 (1984)). Methods commonly known in the art of recombinant DNA technology may be routinely applied to select the desired recombinant clone, and such methods are described, for example, in Ausubel et al. (eds.), Current Protocols in Molecular Biology, John Wiley & Sons, NY (1993); Kriegler, Gene Transfer and Expression, A Laboratory Manual, Stockton Press, NY (1990); and in Chapters 12 and 13, Dracopoli et al. (eds.), Current Protocols in Human Genetics, John Wiley & Sons, NY (1994); Colberre-Garapin et al., J. Mol. Biol. 150:1 (1981), which are incorporated by reference herein in their entireties.

[0833] The expression level of a fusion protein can be increased by vector amplification (for a review, see Bebbington and Hentschel, The use of vectors based on gene amplification for the expression of cloned genes in mammalian cells in DNA cloning, Vol. 3 (Academic Press, New York, 1987)). When a marker in the vector system expressing a fusion protein is amplifiable, increase in the level of inhibitor present in culture of host cell will increase the number of copies of the marker gene. Since the amplified region is associated with the fusion protein gene, production of the fusion protein will also increase (Crouse et al., Mol. Cell. Biol. 3:257 (1983)).

[0834] The host cell may be co-transfected with multiple expression vectors provided herein. The vectors may contain identical selectable markers which enable equal expression of respective encoding polypeptides. Alternatively, a single vector may be used which encodes, and is capable of expressing multiple polypeptides. The coding sequences may comprise cDNA or genomic DNA.

[0835] Once a fusion protein provided herein has been produced by recombinant expression, it may be purified by any method known in the art for purification of a polypeptide (e.g., an immunoglobulin molecule), for example, by chromatography (e.g., ion exchange, affinity, particularly by affinity for the specific antigen after Protein A, sizing column chromatography, and Kappa select affinity chromatography), centrifugation, differential solubility, or by any other standard technique for the purification of proteins. Further, the fusion protein molecules provided herein can be fused to heterologous polypeptide sequences described herein or otherwise known in the art to facilitate purification.

### Immunoconjugates

[0836] In some embodiments, the present disclosure also provides immunoconjugates comprising any of the anti-IL-23R antibodies described herein conjugated to one or more cytotoxic agents, such as chemotherapeutic agents or drugs, growth inhibitory agents, toxins (e.g., protein toxins, enzymatically active toxins of bacterial, fungal, plant, or animal origin, or fragments thereof), or radioactive isotopes.

[0837] In some embodiments, an immunoconjugate is an antibody-drug conjugate (ADC) in which an antibody is conjugated to one or more drugs, including but not limited to a maytansinoid (see U.S. Pat. Nos. 5,208,020, 5,416,064 and European Patent EP 0 425 235 B1); an auristatin such as monomethylauristatin drug moieties DE and DF (MMAE and MMAF) (see U.S. Pat. Nos. 5,635,483 and 5,780,588, and 7,498,298); a dolastatin; a calicheamicin or derivative thereof (see U.S. Pat. Nos. 5,712,374, 5,714,586, 5,739,116, 5,767,285, 5,770,701, 5,770,710, 5,773,001, and 5,877,296; Hinman et al., Cancer Res. 53:3336-3342 (1993); and Lode et al., Cancer Res. 58:2925-2928 (1998)); an anthracycline such as daunomycin or doxorubicin (see Kratz et al., Current Med. Chem. 13:477-523 (2006); Jeffrey et al., Bioorganic & Med. Chem. Letters 16:358-362 (2006); Torgov et al., Bioconj. Chem. 16:717-721 (2005); Nagy et al., Proc. Natd. Acad. Sci. USA 97:829-834 (2000); Dubowchik et al., Bioorg. & Med. Chem. Letters 12:1529-1532 (2002); King et al., J. Med. Chem. 45:4336-4343 (2002); and U.S. Pat. No. 6,630,579); methotrexate; vindesine; a taxane such as docetaxel, paclitaxel, larotaxel, tesetaxel, and ortataxel; a trichothecene; and CC1065.

[0838] In some embodiments, an immunoconjugate comprises an antibody as described herein conjugated to an enzymatically active toxin or fragment thereof, including but not limited to diphtheria A chain, nonbinding active fragments of diphtheria toxin, exotoxin A chain (from Pseudomonas aeruginosa), ricin A chain, abrin A chain, modeccin A chain, alpha-sarcin, Aleurites fordii proteins, dianthin proteins, Phytolaca americana proteins (PAPI, PAPII, and PAP-S), Momordica charantia inhibitor, curcin, crotin, Sapaonaria officinalis inhibitor, gelonin, mitogellin, restrictocin, phenomycin, enomycin, and the tricothecenes.

[0839] In some embodiments, an immunoconjugate comprises an antibody as described herein conjugated to a radioactive atom to form a radioconjugate. A variety of radioactive isotopes are available for the production of radioconjugates. Examples include At²¹¹, I³¹, I²⁵, Y⁹⁰, Re¹⁸⁶, Re¹⁸⁸, Sm¹⁵³, Bi²¹², P³², Pb²¹² and radioactive isotopes of Lu. When the radioconjugate is used for detection, it may comprise a radioactive atom for scintigraphic studies, for example tc99m or 1123, or a spin label for nuclear magnetic resonance (NMR) imaging (also known as magnetic resonance imaging, mri), such as iodine-123 again, iodine-131, indium-111, fluorine-19, carbon-13, nitrogen-15, oxygen-17, gadolinium, manganese or iron.

[0840] Conjugates of an antibody and cytotoxic agent may be made using a variety of bifunctional protein coupling agents such as N-succinimidyl-3-(2-pyridyldithio) propionate (SPDP), succinimidyl-4-(N-maleimidomethyl) cyclohexane-1-carboxylate (SMCC), iminothiolane (IT), bifunctional derivatives of imidoesters (such as dimethyl adipimidate HCl), active esters (such as disuccinimidyl suberate), aldehydes (such as glutaraldehyde), bis-azido compounds (such as bis (p-azidobenzoyl) hexanediamine), bis-diazonium derivatives (such as bis-(p-diazoniumbenzoyl)-ethylenediamine), diisocyanates (such as toluene 2,6-diisocyanate), and bis-active fluorine compounds (such as 1,5-difluoro-2,4-dinitrobenzene). For example, a ricin immunotoxin can be prepared as described in Vitetta et al., Science 238:1098 (1987). Carbon-14-labeled 1-isothiocyanatobenzyl-3-methyldiethylene triaminepentaacetic acid (MX-DTPA) is an exemplary chelating agent for conjugation of radionucleotide to the antibody. See WO94/11026.

[0841] The linker may be a “cleavable linker” facilitating release of the conjugated agent in the cell, but non-cleavable linkers are also contemplated herein. Linkers for use in the conjugates of the present disclosure include, without limitation, acid labile linkers (e.g., hydrazone linkers), disulfide-containing linkers, peptidase-sensitive linkers (e.g., peptide linkers comprising amino acids, for example, valine and/or citrulline such as citrulline-valine or phenylalanine-lysine), photolabile linkers, dimethyl linkers, thioether linkers, or hydrophilic linkers designed to evade multidrug transporter-mediated resistance.

[0842] The immunuoconjugates or ADCs herein contemplate, but are not limited to such conjugates prepared with cross-linker reagents including, but not limited to, BMPS, EMCS, GMBS, HBVS, LC-SMCC, MBS, MPBH, SBAP, SIA, SIAB, SMCC, SMPB, SMPH, sulfo-EMCS, sulfo-GMBS, sulfo-KMUS, sulfo-MBS, sulfo-SIAB, sulfo-SMCC, and sulfo-SMPB, and SVSB (succinimidyl-(4-vinylsulfone)benzoate) which are commercially available (e.g., from Pierce Biotechnology, Inc., Rockford, IL., U.S.A).

[0843] In other embodiments, antibodies provided herein are conjugated or recombinantly fused, e.g., to a diagnostic molecule. Such diagnosis and detection can be accomplished, for example, by coupling the antibody to detectable substances including, but not limited to, various enzymes, such as, but not limited to, horseradish peroxidase, alkaline phosphatase, beta-galactosidase, or acetylcholinesterase; prosthetic groups, such as, but not limited to, streptavidin/biotin or avidin/biotin; fluorescent materials, such as, but not limited to, umbelliferone, fluorescein, fluorescein isothiocynate, rhodamine, dichlorotriazinylamine fluorescein, dansyl chloride, or phycoerythrin; luminescent materials, such as, but not limited to, luminol; bioluminescent materials, such as, but not limited to, luciferase, luciferin, or aequorin; chemiluminescent material, such as, 225 Acγ-emitting, Auger-emitting, β-emitting, an alpha-emitting or positron-emitting radioactive isotope. In some embodiments, the conjugated antibodies are used for screening purpose(s). In some embodiments, the screening method is high throughput screening with a library of the conjugated antibodies. In some embodiments, the conjugated antibodies are used to mark or label a cell or cellular target or antigen for diagnostic, screening, targeting, isolation, quantification or other such purposes or applications. In some embodiments, unique or distinct antibodies, including antibodies conjugated or fused to different diagnostic molecules may be utilized in combination in one or more such application, screening method, etc.

### Polynucleotides

[0844] In certain embodiments, the disclosure provides polynucleotides that encode the present antibodies that bind to IL-23R and fusion proteins comprising the antibodies that bind to IL-23R described herein. The polynucleotides of the disclosure can be in the form of RNA or in the form of DNA. DNA includes cDNA, genomic DNA, and synthetic DNA; and can be double-stranded or single-stranded, and if single stranded can be the coding strand or non-coding (anti-sense) strand. In some embodiments, the polynucleotide is in the form of cDNA. In some embodiments, the polynucleotide is a synthetic polynucleotide.

[0845] The present disclosure further relates to variants of the polynucleotides described herein, wherein the variant encodes, for example, fragments, analogs, and/or derivatives of the antibody that binds IL-23R of the disclosure. In certain embodiments, the present disclosure provides a polynucleotide comprising a polynucleotide having a nucleotide sequence at least about 75% identical, at least about 80% identical, at least about 85% identical, at least about 90% identical, at least about 95% identical, and in some embodiments, at least about 96%, 97%, 98% or 99% identical to a polynucleotide encoding the antibody that binds IL-23R of the disclosure. As used herein, the phrase “a polynucleotide having a nucleotide sequence at least, for example, 95% “identical” to a reference nucleotide sequence” is intended to mean that the nucleotide sequence of the polynucleotide is identical to the reference sequence except that the polynucleotide sequence can include up to five point mutations per each 100 nucleotides of the reference nucleotide sequence. In other words, to obtain a polynucleotide having a nucleotide sequence at least 95% identical to a reference nucleotide sequence, up to 5% of the nucleotides in the reference sequence can be deleted or substituted with another nucleotide, or a number of nucleotides up to 5% of the total nucleotides in the reference sequence can be inserted into the reference sequence. These mutations of the reference sequence can occur at the 5′ or 3′ terminal positions of the reference nucleotide sequence or anywhere between those terminal positions, interspersed either individually among nucleotides in the reference sequence or in one or more contiguous groups within the reference sequence.

[0846] The polynucleotide variants can contain alterations in the coding regions, non-coding regions, or both. In some embodiments, a polynucleotide variant contains alterations which produce silent substitutions, additions, or deletions, but does not alter the properties or activities of the encoded polypeptide. In some embodiments, a polynucleotide variant comprises silent substitutions that results in no change to the amino acid sequence of the polypeptide (due to the degeneracy of the genetic code). Polynucleotide variants can be produced for a variety of reasons, for example, to optimize codon expression for a particular host (i.e., change codons in the human mRNA to those preferred by a bacterial host such as E. coli). In some embodiments, a polynucleotide variant comprises at least one silent mutation in a non-coding or a coding region of the sequence.

[0847] In some embodiments, a polynucleotide variant is produced to modulate or alter expression (or expression levels) of the encoded polypeptide. In some embodiments, a polynucleotide variant is produced to increase expression of the encoded polypeptide. In some embodiments, a polynucleotide variant is produced to decrease expression of the encoded polypeptide. In some embodiments, a polynucleotide variant has increased expression of the encoded polypeptide as compared to a parental polynucleotide sequence. In some embodiments, a polynucleotide variant has decreased expression of the encoded polypeptide as compared to a parental polynucleotide sequence.

[0848] Also provided are vectors comprising the nucleic acid molecules described herein. In an embodiment, the nucleic acid molecules can be incorporated into a recombinant expression vector. The present disclosure provides recombinant expression vectors comprising any of the nucleic acids of the disclosure. As used herein, the term “recombinant expression vector” means a genetically-modified oligonucleotide or polynucleotide construct that permits the expression of an mRNA, protein, polypeptide, or peptide by a host cell, when the construct comprises a nucleotide sequence encoding the mRNA, protein, polypeptide, or peptide, and the vector is contacted with the cell under conditions sufficient to have the mRNA, protein, polypeptide, or peptide expressed within the cell. The vectors described herein are not naturally-occurring as a whole; however, parts of the vectors can be naturally-occurring. The described recombinant expression vectors can comprise any type of nucleotides, including, but not limited to DNA and RNA, which can be single-stranded or double-stranded, synthesized or obtained in part from natural sources, and which can contain natural, non-natural or altered nucleotides. The recombinant expression vectors can comprise naturally-occurring or non-naturally-occurring internucleotide linkages, or both types of linkages. The non-naturally occurring or altered nucleotides or internucleotide linkages do not hinder the transcription or replication of the vector.

[0849] In an embodiment, the recombinant expression vector of the disclosure can be any suitable recombinant expression vector, and can be used to transform or transfect any suitable host. Suitable vectors include those designed for propagation and expansion or for expression or both, such as plasmids and viruses. The vector can be selected from the group consisting of the pUC series (Fermentas Life Sciences, Glen Burnie, Md.), the pBluescript series (Stratagene, LaJolla, Calif.), the pET series (Novagen, Madison, Wis.), the pGEX series (Pharmacia Biotech, Uppsala, Sweden), and the pEX series (Clontech, Palo Alto, Calif.). Bacteriophage vectors, such as λGT10, λGT11, λEMBL4, and λNM1149, λZapII (Stratagene) can be used. Examples of plant expression vectors include pBI01, pBI01.2, pBIl21, pBI101.3, and pBIN19 (Clontech). Examples of animal expression vectors include pEUK-Cl, pMAM, and pMAMneo (Clontech). The recombinant expression vector may be a viral vector, e.g., a retroviral vector, e.g., a gamma retroviral vector.

[0850] In an embodiment, the recombinant expression vectors are prepared using standard recombinant DNA techniques described in, for example, Sambrook et al., supra, and Ausubel et al., supra. Constructs of expression vectors, which are circular or linear, can be prepared to contain a replication system functional in a prokaryotic or eukaryotic host cell. Replication systems can be derived, e.g., from ColE1, SV40, 2μ plasmid, λ, bovine papilloma virus, and the like.

[0851] The recombinant expression vector may comprise regulatory sequences, such as transcription and translation initiation and termination codons, which are specific to the type of host (e.g., bacterium, plant, fungus, or animal) into which the vector is to be introduced, as appropriate, and taking into consideration whether the vector is DNA- or RNA-based.

[0852] The recombinant expression vector can include one or more marker genes, which allow for selection of transformed or transfected hosts. Marker genes include biocide resistance, e.g., resistance to antibiotics, heavy metals, etc., complementation in an auxotrophic host to provide prototrophy, and the like. Suitable marker genes for the described expression vectors include, for instance, neomycin/G418 resistance genes, histidinol x resistance genes, histidinol resistance genes, tetracycline resistance genes, and ampicillin resistance genes.

[0853] The recombinant expression vector can comprise a native or normative promoter operably linked to the nucleotide sequence of the disclosure. The selection of promoters, e.g., strong, weak, tissue-specific, inducible and developmental-specific, is within the ordinary skill of the artisan. Similarly, the combining of a nucleotide sequence with a promoter is also within the skill of the artisan. The promoter can be a non-viral promoter or a viral promoter, e.g., a cytomegalovirus (CMV) promoter, an RSV promoter, an SV40 promoter, or a promoter found in the long-terminal repeat of the murine stem cell virus.

[0854] The recombinant expression vectors can be designed for either transient expression, for stable expression, or for both. Also, the recombinant expression vectors can be made for constitutive expression or for inducible expression.

[0855] Further, the recombinant expression vectors can be made to include a suicide gene. As used herein, the term “suicide gene” refers to a gene that causes the cell expressing the suicide gene to die. The suicide gene can be a gene that confers sensitivity to an agent, e.g., a drug, upon the cell in which the gene is expressed, and causes the cell to die when the cell is contacted with or exposed to the agent. Suicide genes are known in the art and include, for example, the Herpes Simplex Virus (HSV) thymidine kinase (TK) gene, cytosine deaminase, purine nucleoside phosphorylase, and nitroreductase.

[0856] In certain embodiments, a polynucleotide is isolated. In certain embodiments, a polynucleotide is substantially pure.

[0857] Also provided are host cells comprising the nucleic acid molecules described herein. The host cell may be any cell that contains a heterologous nucleic acid. The heterologous nucleic acid can be a vector (e.g., an expression vector). For example, a host cell can be a cell from any organism that is selected, modified, transformed, grown, used or manipulated in any way, for the production of a substance by the cell, for example the expression by the cell of a gene, a DNA or RNA sequence, a protein or an enzyme. An appropriate host may be determined. For example, the host cell may be selected based on the vector backbone and the desired result. By way of example, a plasmid or cosmid can be introduced into a prokaryote host cell for replication of several types of vectors. Bacterial cells such as, but not limited to DH5a, JM109, and KCB, SURE® Competent Cells, and SOLOPACK Gold Cells, can be used as host cells for vector replication and/or expression. Additionally, bacterial cells such as E. coli LE392 could be used as host cells for phage viruses. Eukaryotic cells that can be used as host cells include, but are not limited to yeast (e.g., YPH499, YPH500 and YPH501), insects and mammals. Examples of mammalian eukaryotic host cells for replication and/or expression of a vector include, but are not limited to, HeLa, NIH3T3, Jurkat, 293, COS, Saos, PC12, SP2/0 (American Type Culture Collection (ATCC), Manassas, VA, CRL-1581), NS0 (European Collection of Cell Cultures (ECACC), Salisbury, Wiltshire, UK, ECACC No. 85110503), FO (ATCC CRL-1646) and Ag653 (ATCC CRL-1580) murine cell lines. An exemplary human myeloma cell line is U266 (ATCC CRL-TIB-196). Other useful cell lines include those derived from Chinese Hamster Ovary (CHO) cells such as CHO-K1SV (Lonza Biologics, Walkersville, MD), CHO-K1 (ATCC CRL-61) or DG44.

### Preparation of Antibodies and Method of Making

[0858] Methods of preparing antibodies have been described. See, e.g., E1s Pardon et al, Nature Protocol, 9(3): 674 (2014). Antibodies (such as scFv fragments) may be obtained using methods known in the art such as by immunizing a Camelid species (such as camel or llama) and obtaining hybridomas therefrom, or by cloning a library of antibodies using molecular biology techniques known in the art and subsequent selection by ELISA with individual clones of unselected libraries or by using phage display.

[0859] Antibodies provided herein may be produced by culturing cells transformed or transfected with a vector containing an antibody-encoding nucleic acid. Polynucleotide sequences encoding polypeptide components of the antibody of the present disclosure can be obtained using standard recombinant techniques. Desired polynucleotide sequences may be isolated and sequenced from antibody producing cells such as hybridomas cells or B cells. Alternatively, polynucleotides can be synthesized using nucleotide synthesizer or PCR techniques. Once obtained, sequences encoding the polypeptides are inserted into a recombinant vector capable of replicating and expressing heterologous polynucleotides in host cells. Many vectors that are available and known in the art can be used for the purpose of the present disclosure. Selection of an appropriate vector will depend mainly on the size of the nucleic acids to be inserted into the vector and the particular host cell to be transformed with the vector. Host cells suitable for expressing antibodies of the present disclosure include prokaryotes such as Archaebacteria and Eubacteria, including Gram-negative or Gram-positive organisms, eukaryotic microbes such as filamentous fungi or yeast, invertebrate cells such as insect or plant cells, and vertebrate cells such as mammalian host cell lines. Host cells are transformed with the above-described expression vectors and cultured in conventional nutrient media modified as appropriate for inducing promoters, selecting transformants, or amplifying the genes encoding the desired sequences. Antibodies produced by the host cells are purified using standard protein purification methods as known in the art.

[0860] Methods for antibody production including vector construction, expression, and purification are further described in Pluckthun et al., Antibody Engineering: Producing antibodies in Escherichia coli: From PCR to fermentation 203-52 (McCafferty et al. eds., 1996); Kwong and Rader, E. coli Expression and Purification of Fab Antibody Fragments, in Current Protocols in Protein Science (2009); Tachibana and Takekoshi, Production of Antibody Fab Fragments in Escherichia coli, in Antibody Expression and Production (Al-Rubeai ed., 2011); and Therapeutic Monoclonal Antibodies: From Bench to Clinic (An ed., 2009).

[0861] It is, of course, contemplated that alternative methods, which are well known in the art, may be employed to prepare anti-IL-23R antibodies. For instance, the appropriate amino acid sequence, or portions thereof, may be produced by direct peptide synthesis using solid-phase techniques (see, e.g., Stewart et al., Solid-Phase Peptide Synthesis (1969); and Merrifield, J. Am. Chem. Soc. 85:2149-54 (1963)). In vitro protein synthesis may be performed using manual techniques or by automation. Various portions of the anti-IL-23R antibody may be chemically synthesized separately and combined using chemical or enzymatic methods to produce the desired anti-IL-23R antibody. Alternatively, antibodies may be purified from cells or bodily fluids, such as milk, of a transgenic animal engineered to express the antibody, as disclosed, for example, in U.S. Pat. Nos. 5,545,807 and 5,827,690.

### Polyclonal Antibodies

[0862] Polyclonal antibodies are generally raised in animals by multiple subcutaneous (sc) or intraperitoneal (ip) injections of the relevant antigen and an adjuvant. It may be useful to conjugate the relevant antigen to a protein that is immunogenic in the species to be immunized, e.g., keyhole limpet hemocyanin (KLH), serum albumin, bovine thyroglobulin, or soybean trypsin inhibitor, using a bifunctional or derivatizing agent, e.g., maleimidobenzoyl sulfosuccinimide ester (conjugation through cysteine residues), N-hydroxysuccinimide (through lysine residues), glutaraldehyde, succinic anhydride, SOCl₂, or R¹N═C═NR, where R and R¹ are independently lower alkyl groups. Examples of adjuvants which may be employed include Freund's complete adjuvant and MPL-TDM adjuvant (monophosphoryl Lipid A, synthetic trehalose dicorynomycolate). The immunization protocol may be selected by one skilled in the art without undue experimentation.

[0863] For example, the animals are immunized against the antigen, immunogenic conjugates, or derivatives by combining, e.g., 100 μg or 5 μg of the protein or conjugate (for rabbits or mice, respectively) with 3 volumes of Freund's complete adjuvant and injecting the solution intradermally at multiple sites. One month later, the animals are boosted with ⅕ to 1/10 the original amount of peptide or conjugate in Freund's complete adjuvant by subcutaneous injection at multiple sites. Seven to fourteen days later, the animals are bled and the serum is assayed for antibody titer. Animals are boosted until the titer plateaus. Conjugates also can be made in recombinant cell culture as protein fusions. Also, aggregating agents such as alum are suitable to enhance the immune response.

### Monoclonal Antibodies

[0864] Monoclonal antibodies are obtained from a population of substantially homogeneous antibodies, i.e., the individual antibodies comprising the population are identical except for possible naturally occurring mutations and/or post-translational modifications (e.g., isomerizations, amidations) that may be present in minor amounts. Thus, the modifier “monoclonal” indicates the character of the antibody as not being a mixture of discrete antibodies.

[0865] For example, the monoclonal antibodies may be made using the hybridoma method first described by Kohler et al., Nature, 256:495 (1975), or may be made by recombinant DNA methods (U.S. Pat. No. 4,816,567).

[0866] In the hybridoma method, an appropriate host animal is immunized to elicit lymphocytes that produce or are capable of producing antibodies that will specifically bind the protein used for immunization. Alternatively, lymphocytes may be immunized in vitro. Lymphocytes then are fused with myeloma cells using a suitable fusing agent, such as polyethylene glycol, to form a hybridoma cell (Goding, Monoclonal Antibodies: Principles and Practice, pp. 59-103 (Academic Press, 1986).

[0867] The immunizing agent will typically include the antigenic protein or a fusion variant thereof. Goding, Monoclonal Antibodies: Principles and Practice, Academic Press (1986), pp. 59-103. Immortalized cell lines are usually transformed mammalian cells. The hybridoma cells thus prepared are seeded and grown in a suitable culture medium that preferably contains one or more substances that inhibit the growth or survival of the unfused, parental myeloma cells. Preferred immortalized myeloma cells are those that fuse efficiently, support stable high-level production of antibody by the selected antibody-producing cells, and are sensitive to a medium such as HAT medium.

[0868] Culture medium in which hybridoma cells are growing is assayed for production of monoclonal antibodies directed against the antigen. The culture medium in which the hybridoma cells are cultured can be assayed for the presence of monoclonal antibodies directed against the desired antigen. Such techniques and assays are known in the in art. For example, binding affinity may be determined by the Scatchard analysis of Munson et al., Anal. Biochem., 107:220 (1980).

[0869] After hybridoma cells are identified that produce antibodies of the desired specificity, affinity, and/or activity, the clones may be subcloned by limiting dilution procedures and grown by standard methods (Goding, supra). Suitable culture media for this purpose include, for example, D-MEM or RPMI-1640 medium. In addition, the hybridoma cells may be grown in vivo as tumors in a mammal.

[0870] The monoclonal antibodies secreted by the subclones are suitably separated from the culture medium, ascites fluid, or serum by conventional immunoglobulin purification procedures such as, for example, protein A-Sepharose, hydroxylapatite chromatography, gel electrophoresis, dialysis, or affinity chromatography.

[0871] Monoclonal antibodies may also be made by recombinant DNA methods, such as those described in U.S. Pat. No. 4,816,567, and as described above. DNA encoding the monoclonal antibodies is readily isolated and sequenced using conventional procedures (e.g., by using oligonucleotide probes that are capable of binding specifically to genes encoding the heavy and light chains of murine antibodies). The hybridoma cells serve as a preferred source of such DNA. Once isolated, the DNA may be placed into expression vectors, which are then transfected into host cells such as E. coli cells, simian COS cells, Chinese hamster ovary (CHO) cells, or myeloma cells that do not otherwise produce immunoglobulin protein, in order to synthesize monoclonal antibodies in such recombinant host cells. Review articles on recombinant expression in bacteria of DNA encoding the antibody include Skerra et al., Curr. Opinion in Immunol., 5:256-262 (1993) and Pliiuckthun, Immunol. Revs. 130:151-188 (1992).

[0872] In a further embodiment, antibodies can be isolated from antibody phage libraries generated using the techniques described in McCafferty et al., Nature, 348:552-554 (1990). Clackson et al., Nature, 352:624-628 (1991) and Marks et al., J. Mol. Biol., 222:581-597 (1991). Subsequent publications describe the production of high affinity (nM range) human antibodies by chain shuffling (Marks et al., Bio/Technology, 10:779-783 (1992)), as well as combinatorial infection and in vivo recombination as a strategy for constructing very large phage libraries (Waterhouse et al., Nucl. Acids Res., 21:2265-2266 (1993)). Thus, these techniques are viable alternatives to traditional monoclonal antibody hybridoma techniques for isolation of monoclonal antibodies.

[0873] The DNA also may be modified, for example, by substituting the coding sequence (U.S. Pat. No. 4,816,567; Morrison, et al., Proc. Natl Acad. Sci. USA, 81:6851 (1984)), or by covalently joining to the coding sequence all or part of the coding sequence for a non-immunoglobulin polypeptide. Such non-immunoglobulin polypeptides can be substituted to create a chimeric bivalent antibody comprising one antigen-combining site having specificity for an antigen and another antigen-combining site having specificity for a different antigen.

[0874] Chimeric or hybrid antibodies also may be prepared in vitro using known methods in synthetic protein chemistry, including those involving crosslinking agents. For example, immunotoxins may be constructed using a disulfide-exchange reaction or by forming a thioether bond. Examples of suitable reagents for this purpose include iminothiolate and methyl-4-mercaptobutyrimidate.

### Recombinant Production in Prokarvotic Cells

[0875] Polynucleic acid sequences encoding the antibodies of the present disclosure can be obtained using standard recombinant techniques. Desired polynucleic acid sequences may be isolated and sequenced from antibody producing cells such as hybridoma cells. Alternatively, polynucleotides can be synthesized using nucleotide synthesizer or PCR techniques. Once obtained, sequences encoding the polypeptides are inserted into a recombinant vector capable of replicating and expressing heterologous polynucleotides in prokaryotic hosts. Many vectors that are available and known in the art can be used for the purpose of the present disclosure. Selection of an appropriate vector will depend mainly on the size of the nucleic acids to be inserted into the vector and the particular host cell to be transformed with the vector. Each vector contains various components, depending on its function (amplification or expression of heterologous polynucleotide, or both) and its compatibility with the particular host cell in which it resides. The vector components generally include, but are not limited to, an origin of replication, a selection marker gene, a promoter, a ribosome binding site (RBS), a signal sequence, the heterologous nucleic acid insert and a transcription termination sequence.

[0876] In general, plasmid vectors containing replicon and control sequences which are derived from species compatible with the host cell are used in connection with these hosts. The vector ordinarily carries a replication site, as well as marking sequences which are capable of providing phenotypic selection in transformed cells. For example, E. coli is typically transformed using pBR322, a plasmid derived from an E. coli species. Examples of pBR322 derivatives used for expression of particular antibodies are described in detail in Carter et al., U.S. Pat. No. 5,648,237.

[0877] In addition, phage vectors containing replicon and control sequences that are compatible with the host microorganism can be used as transforming vectors in connection with these hosts. For example, bacteriophage such as GEM™-11 may be utilized in making a recombinant vector which can be used to transform susceptible host cells such as E. coli LE392.

[0878] The expression vector of the present application may comprise two or more promoter-cistron pairs, encoding each of the polypeptide components. A promoter is an untranslated regulatory sequence located upstream (5′) to a cistron that modulates its expression. Prokaryotic promoters typically fall into two classes, inducible and constitutive. Inducible promoter is a promoter that initiates increased levels of transcription of the cistron under its control in response to changes in the culture condition, e.g. the presence or absence of a nutrient or a change in temperature.

[0879] A large number of promoters recognized by a variety of potential host cells are well known. The selected promoter can be operably linked to cistron DNA encoding the present antibody by removing the promoter from the source DNA via restriction enzyme digestion and inserting the isolated promoter sequence into the vector of the present application. Both the native promoter sequence and many heterologous promoters may be used to direct amplification and/or expression of the target genes. In some embodiments, heterologous promoters are utilized, as they generally permit greater transcription and higher yields of expressed target gene as compared to the native target polypeptide promoter.

[0880] Promoters suitable for use with prokaryotic hosts include the PhoA promoter, the-galactamase and lactose promoter systems, a tryptophan (trp) promoter system and hybrid promoters such as the tac or the trc promoter. However, other promoters that are functional in bacteria (such as other known bacterial or phage promoters) are suitable as well. Their nucleic acid sequences have been published, thereby enabling a skilled worker operably to ligate them to cistrons encoding the target peptide (Siebenlist et al. Cell 20: 269 (1980)) using linkers or adaptors to supply any required restriction sites.

[0881] In one aspect, each cistron within the recombinant vector comprises a secretion signal sequence component that directs translocation of the expressed polypeptides across a membrane. In general, the signal sequence may be a component of the vector, or it may be a part of the target polypeptide DNA that is inserted into the vector. The signal sequence selected for the purpose of this invention should be one that is recognized and processed (i.e. cleaved by a signal peptidase) by the host cell. For prokaryotic host cells that do not recognize and process the signal sequences native to the heterologous polypeptides, the signal sequence can be substituted by a prokaryotic signal sequence selected, for example, from the group consisting of the alkaline phosphatase, penicillinase, Ipp, or heat-stable enterotoxin II (STII) leaders, LamB, PhoE, PelB, OmpA and MBP.

[0882] In some embodiments, the production of the antibodies according to the present disclosure can occur in the cytoplasm of the host cell, and therefore does not require the presence of secretion signal sequences within each cistron. Certain host strains (e.g., the E. coli trxB⁻ strains) provide cytoplasm conditions that are favorable for disulfide bond formation, thereby permitting proper folding and assembly of expressed protein subunits.

[0883] Prokaryotic host cells suitable for expressing the antibodies of the present disclosure include Archaebacteria and Eubacteria, such as Gram-negative or Gram-positive organisms. Examples of useful bacteria include Escherichia (e.g., E. coli), Bacilli (e.g., B. subtilis), Enterobacteria, Pseudomonas species (e.g., P. aeruginosa), Salmonella typhimurium, Serratia marcescans, Klebsiella, Proteus, Shigella, Rhizobia, Vitreoscilla, or Paracoccus. In some embodiments, gram-negative cells are used. In one embodiment, E. coli cells are used as hosts. Examples of E. coli strains include strain W3110 (Bachmann, Cellular and Molecular Biology, vol. 2 (Washington, D.C.: American Society for Microbiology, 1987), pp. 1190-1219; ATCC Deposit No. 27,325) and derivatives thereof, including strain 33D3 having genotype W3110 AfhuA (AtonA) ptr3 lac Iq lacL8 AompT A(nmpc-fepE) degP41 kan^{R} (U.S. Pat. No. 5,639,635). Other strains and derivatives thereof, such as E. coli 294 (ATCC 31,446), E. coli B, E. coli 1776 (ATCC 31,537) and E. coli RV308 (ATCC 31,608) are also suitable. These examples are illustrative rather than limiting. Methods for constructing derivatives of any of the above-mentioned bacteria having defined genotypes are known in the art and described in, for example, Bass et al., Proteins, 8:309-314 (1990). It is generally necessary to select the appropriate bacteria taking into consideration replicability of the replicon in the cells of a bacterium. For example, E. coli, Serratia, or Salmonella species can be suitably used as the host when well known plasmids such as pBR322, pBR325, pACYC177, or pKN410 are used to supply the replicon.

[0884] Typically the host cell should secrete minimal amounts of proteolytic enzymes, and additional protease inhibitors may desirably be incorporated in the cell culture.

[0885] Host cells are transformed with the above-described expression vectors and cultured in conventional nutrient media modified as appropriate for inducing promoters, selecting transformants, or amplifying the genes encoding the desired sequences. Transformation means introducing DNA into the prokaryotic host so that the DNA is replicable, either as an extrachromosomal element or by chromosomal integrant. Depending on the host cell used, transformation is done using standard techniques appropriate to such cells. The calcium treatment employing calcium chloride is generally used for bacterial cells that contain substantial cell-wall barriers. Another method for transformation employs polyethylene glycol/DMSO. Yet another technique used is electroporation.

[0886] Prokaryotic cells used to produce the antibodies of the present application are grown in media known in the art and suitable for culture of the selected host cells. Examples of suitable media include luria broth (LB) plus necessary nutrient supplements. In some embodiments, the media also contains a selection agent, chosen based on the construction of the expression vector, to selectively permit growth of prokaryotic cells containing the expression vector. For example, ampicillin is added to media for growth of cells expressing ampicillin resistant gene.

[0887] Any necessary supplements besides carbon, nitrogen, and inorganic phosphate sources may also be included at appropriate concentrations introduced alone or as a mixture with another supplement or medium such as a complex nitrogen source. Optionally the culture medium may contain one or more reducing agents selected from the group consisting of glutathione, cysteine, cystamine, thioglycollate, dithioerythritol and dithiothreitol. The prokaryotic host cells are cultured at suitable temperatures and pHs.

[0888] If an inducible promoter is used in the expression vector of the present application, protein expression is induced under conditions suitable for the activation of the promoter. In one aspect of the present application, PhoA promoters are used for controlling transcription of the polypeptides. Accordingly, the transformed host cells are cultured in a phosphate-limiting medium for induction. In some embodiments, the phosphate-limiting medium is the C.R.A.P medium (see, e.g., Simmons et al., J. Immunol. Methods 263:133-147 (2002)). A variety of other inducers may be used, according to the vector construct employed, as is known in the art.

[0889] The expressed antibodies of the present disclosure are secreted into and recovered from the periplasm of the host cells. Protein recovery typically involves disrupting the microorganism, generally by such means as osmotic shock, sonication or lysis. Once cells are disrupted, cell debris or whole cells may be removed by centrifugation or filtration. The proteins may be further purified, for example, by affinity resin chromatography. Alternatively, proteins can be transported into the culture media and isolated therein. Cells may be removed from the culture and the culture supernatant being filtered and concentrated for further purification of the proteins produced. The expressed polypeptides can be further isolated and identified using commonly known methods such as polyacrylamide gel electrophoresis (PAGE) and Western blot assay.

[0890] Alternatively, protein production is conducted in large quantity by a fermentation process. Various large-scale fed-batch fermentation procedures are available for production of recombinant proteins. To improve the production yield and quality of the antibodies of the present disclosure, various fermentation conditions can be modified. For example, the chaperone proteins have been demonstrated to facilitate the proper folding and solubility of heterologous proteins produced in bacterial host cells. Chen et al. J Bio Chem 274:19601-19605 (1999); U.S. Pat. Nos. 6,083,715; 6,027,888; Bothmann and Pluckthun, J. Biol. Chem. 275:17100-17105 (2000); Ramm and Pluckthun, J. Biol. Chem. 275:17106-17113 (2000); Arie et al., Mol. Microbiol. 39:199-210 (2001).

[0891] To minimize proteolysis of expressed heterologous proteins (especially those that are proteolytically sensitive), certain host strains deficient for proteolytic enzymes can be used for the present invention, as described in, for example, U.S. Pat. Nos. 5,264,365; 5,508,192; Hara et al., Microbial Drug Resistance, 2:63-72 (1996). E. coli strains deficient for proteolytic enzymes and transformed with plasmids overexpressing one or more chaperone proteins may be used as host cells in the expression system encoding the antibodies of the present application.

[0892] The antibodies produced herein can be further purified to obtain preparations that are substantially homogeneous for further assays and uses. Standard protein purification methods known in the art can be employed. The following procedures are exemplary of suitable purification procedures: fractionation on immunoaffinity or ion-exchange columns, ethanol precipitation, reverse phase HPLC, chromatography on silica or on a cation-exchange resin such as DEAE, chromatofocusing, SDS-PAGE, ammonium sulfate precipitation, and gel filtration using, for example, Sephadex G-75. Protein A immobilized on a solid phase for example can be used in some embodiments for immunoaffinity purification of binding molecules of the present disclosure. In some embodiments, the solid phase to which Protein A is immobilized is a column comprising a glass or silica surface. In some embodiments, the solid phase to which Protein A is immobilized is a controlled pore glass column or a silicic acid column. In some embodiments, the column has been coated with a reagent, such as glycerol, in an attempt to prevent nonspecific adherence of contaminants. The solid phase is then washed to remove contaminants non-specifically bound to the solid phase. Finally the antibodies of interest is recovered from the solid phase by elution.

### Recombinant Production in Eukarvotic Cells

[0893] For eukaryotic expression, the vector components generally include, but are not limited to, one or more of the following, a signal sequence, an origin of replication, one or more marker genes, and enhancer element, a promoter, and a transcription termination sequence.

[0894] A vector for use in a eukaryotic host may also an insert that encodes a signal sequence or other polypeptide having a specific cleavage site at the N-terminus of the mature protein or polypeptide. The heterologous signal sequence selected preferably is one that is recognized and processed (i.e., cleaved by a signal peptidase) by the host cell. In mammalian cell expression, mammalian signal sequences as well as viral secretory leaders, for example, the herpes simplex gD signal, are available. The DNA for such precursor region can be ligated in reading frame to DNA encoding the antibodies of the present application.

[0895] Generally, the origin of replication component is not needed for mammalian expression vectors (the SV40 origin may typically be used only because it contains the early promoter).

[0896] Expression and cloning vectors may contain a selection gene, also termed a selectable marker. Selection genes may encode proteins that confer resistance to antibiotics or other toxins, e.g., ampicillin, neomycin, methotrexate, or tetracycline; complement auxotrophic deficiencies; or supply critical nutrients not available from complex media.

[0897] One example of a selection scheme utilizes a drug to arrest growth of a host cell. Those cells that are successfully transformed with a heterologous gene produce a protein conferring drug resistance and thus survive the selection regimen. Examples of such dominant selection use the drugs neomycin, mycophenolic acid and hygromycin.

[0898] Another example of suitable selectable markers for mammalian cells are those that enable the identification of cells competent to take up nucleic acid encoding the antibodies of the present application. For example, cells transformed with the DHFR selection gene are first identified by culturing all of the transformants in a culture medium that contains methotrexate (Mtx), a competitive antagonist of DHFR. An exemplary appropriate host cell when wild-type DHFR is employed is the Chinese hamster ovary (CHO) cell line deficient in DHFR activity. Alternatively, host cells (particularly wild-type hosts that contain endogenous DHFR) transformed or co-transformed with the polypeptide encoding-DNA sequences, wild-type DHFR protein, and another selectable marker such as aminoglycoside 3′-phosphotransferase (APH) can be selected by cell growth in medium containing a selection agent for the selectable marker such as an aminoglycosidic antibiotic.

[0899] Expression and cloning vectors usually contain a promoter that is recognized by the host organism and is operably linked to the nucleic acid encoding the desired polypeptide sequences. Eukaryotic genes have an AT-rich region located approximately 25 to 30 based upstream from the site where transcription is initiated. Another sequence found 70 to 80 bases upstream from the start of the transcription of many genes may be included. The 3′ end of most eukaryotic may be the signal for addition of the poly A tail to the 3′ end of the coding sequence. All of these sequences may be inserted into eukaryotic expression vectors.

[0900] Polypeptide transcription from vectors in mammalian host cells can be controlled, for example, by promoters obtained from the genomes of viruses such as polyoma virus, fowlpox virus, adenovirus (such as Adenovirus 2), bovine papilloma virus, avian sarcoma virus, cytomegalovirus, a retrovirus, hepatitis-B virus and Simian Virus 40 (SV40), from heterologous mammalian promoters, e.g., the actin promoter or an immunoglobulin promoter, from heat-shock promoters, provided such promoters are compatible with the host cell systems.

[0901] Transcription of a DNA encoding the antibodies of the present disclosure by higher eukaryotes is often increased by inserting an enhancer sequence into the vector. Many enhancer sequences are now known from mammalian genes (globin, elastase, albumin, α-fetoprotein, and insulin). Examples include the SV40 enhancer on the late side of the replication origin (bp 100-270), the cytomegalovirus early promoter enhancer, the polyoma enhancer on the late side of the replication origin, and adenovirus enhancers. See also Yaniv, Nature 297:17-18 (1982) on enhancing elements for activation of eukaryotic promoters. The enhancer may be spliced into the vector at a position 5′ or 3′ to the polypeptide encoding sequence, but is preferably located at a site 5′ from the promoter.

[0902] Expression vectors used in eukaryotic host cells (yeast, fungi, insect, plant, animal, human, or nucleated cells from other multicellular organisms) also contain sequences necessary for the termination of transcription and for stabilizing the mRNA. Such sequences are commonly available from the 5′ and, occasionally 3′, untranslated regions of eukaryotic or viral DNAs or cDNAs. These regions contain nucleotide segments transcribed as polyadenylated fragments in the untranslated portion of the polypeptide-encoding mRNA. One useful transcription termination component is the bovine growth hormone polyadenylation region.

[0903] Suitable host cells for cloning or expressing the DNA in the vectors herein include higher eukaryote cells described herein, including vertebrate host cells. Propagation of vertebrate cells in culture (tissue culture) has become a routine procedure. Examples of useful mammalian host cell lines are monkey kidney CV1 line transformed by SV40 (COS-7, ATCC CRL 1651); human embryonic kidney line (293 or 293 cells subcloned for growth in suspension culture, Graham et al., J. Gen Virol. 36:59 (1977)); baby hamster kidney cells (BHK, ATCC CCL 10); Chinese hamster ovary cells/-DHFR (CHO, Urlaub et al., Proc. Natl. Acad. Sci. USA 77:4216 (1980)); mouse sertoli cells (TM4, Mather, Biol. Reprod. 23:243-251 (1980)); monkey kidney cells (CV1 ATCC CCL 70); African green monkey kidney cells (VERO-76, ATCC CRL-1587); human cervical carcinoma cells (HELA, ATCC CCL 2); canine kidney cells (MDCK, ATCC CCL 34); buffalo rat liver cells (BRL 3A, ATCC CRL 1442); human lung cells (W138, ATCC CCL 75); human liver cells (Hep G2, HB 8065); mouse mammary tumor (MMT 060562, ATCC CCL51); TR1 cells (Mather et al., Annals N.Y. Acad. Sci. 383:44-68 (1982)); MRC 5 cells; FS4 cells; and a human hepatoma line (Hep G2).

[0904] Host cells can be transformed with the above-described expression or cloning vectors for antibodies production and cultured in conventional nutrient media modified as appropriate for inducing promoters, selecting transformants, or amplifying the genes encoding the desired sequences.

[0905] The host cells used to produce the antibodies of the present application may be cultured in a variety of media. Commercially available media such as Ham's F10 (Sigma), Minimal Essential Medium ((MEM), (Sigma), RPMI-1640 (Sigma), and Dulbecco's Modified Eagle's Medium ((DMEM), Sigma) are suitable for culturing the host cells. In addition, any of the media described in Ham et al., Meth. Enz. 58:44 (1979), Barnes et al., Anal. Biochem. 102:255 (1980), U.S. Pat. Nos. 4,767,704; 4,657,866; 4,927,762; 4,560,655; or 5,122,469; WO 90/03430; WO 87/00195; or U.S. Pat. Re. 30,985 may be used as culture media for the host cells. Any of these media may be supplemented as necessary with hormones and/or other growth factors (such as insulin, transferrin, or epidermal growth factor), salts (such as sodium chloride, calcium, magnesium, and phosphate), buffers (such as HEPES), nucleotides (such as adenosine and thymidine), antibiotics (such as GENTAMYCIN™ drug), trace elements (defined as inorganic compounds usually present at final concentrations in the micromolar range), and glucose or an equivalent energy source. Any other necessary supplements may also be included at appropriate concentrations that would be known to those skilled in the art. The culture conditions, such as temperature, pH, and the like, are those previously used with the host cell selected for expression, and will be apparent to the ordinarily skilled artisan.

[0906] When using recombinant techniques, the antibodies can be produced intracellularly, in the periplasmic space, or directly secreted into the medium. If the antibody is produced intracellularly, as a first step, the particulate debris, either host cells or lysed fragments, are removed, for example, by centrifugation or ultrafiltration. Where the antibody is secreted into the medium, supernatants from such expression systems are generally first concentrated using a commercially available protein concentration filter, for example, an Amicon or Millipore Pellicon ultrafiltration unit. A protease inhibitor such as PMSF may be included in any of the foregoing steps to inhibit proteolysis and antibiotics may be included to prevent the growth of adventitious contaminants.

[0907] The protein composition prepared from the cells can be purified using, for example, hydroxylapatite chromatography, gel electrophoresis, dialysis, and affinity chromatography, with affinity chromatography being the preferred purification technique. The matrix to which the affinity ligand is attached is most often agarose, but other matrices are available. Mechanically stable matrices such as controlled pore glass or poly (styrene-divinyl) benzene allow for faster flow rates and shorter processing times than can be achieved with agarose. Other techniques for protein purification such as fractionation on an ion-exchange column, ethanol precipitation, Reverse Phase HPLC, chromatography on silica, chromatography on heparin SEPHAROSE™ chromatography on an anion or cation exchange resin (such as a polyaspartic acid column), chromatofocusing, SDS-PAGE, and ammonium sulfate precipitation are also available depending on the antibody to be recovered. Following any preliminary purification step(s), the mixture comprising the antibody of interest and contaminants may be subjected to low pH hydrophobic interaction chromatography.

### Methods of Using the Antibodies

[0908] In one aspect, provided herein is a method of attenuating an activity of IL-23R on a cell, comprising exposing the cell to an effective amount of an antibody or antigen binding fragment thereof provided herein. In one aspect, provided herein is a method of attenuating an activity of IL-23R in a cell, comprising exposing the cell to an effective amount of an antibody or antigen binding fragment thereof provided herein.

[0909] In some embodiments, the antibody provided herein attenuates an IL-23R activity by at least about 10%. In some embodiments, the antibody provided herein attenuates an IL-23R activity by at least about 20%. In some embodiments, the antibody provided herein attenuates an IL-23R activity by at least about 30%. In some embodiments, the antibody provided herein attenuates an IL-23R activity by at least about 40%. In some embodiments, the antibody provided herein attenuates an IL-23R activity by at least about 50%. In some embodiments, the antibody provided herein attenuates an IL-23R activity by at least about 60%. In some embodiments, the antibody provided herein attenuates an IL-23R activity by at least about 70%. In some embodiments, the antibody provided herein attenuates an IL-23R activity by at least about 80%. In some embodiments, the antibody provided herein attenuates an IL-23R activity by at least about 90%. In some embodiments, the antibody provided herein attenuates an IL-23R activity by at least about 95%. In certain embodiments, the antibody described herein can attenuate (e.g., partially attenuate) an IL-23R activity by at least about 15% to about 65%. In certain embodiments, the antibody described herein can attenuate (e.g., partially attenuate) an IL-23R activity by at least about 20% to about 65%. In certain embodiments, the antibody described herein can attenuate (e.g., partially attenuate) an IL-23R activity by at least about 30% to about 65%.

[0910] A non-limiting example of an IL-23R activity is IL-23R mediated signaling. Thus, in certain embodiments, provided herein is a method of attenuating (e.g., partially attenuating) IL-23R mediated signaling in a cell, comprising exposing the cell to an effective amount of an antibody or antigen binding fragment thereof provided herein.

[0911] In some embodiments, the antibody provided herein attenuates IL-23R mediated signaling by at least about 10%. In some embodiments, the antibody provided herein attenuates IL-23R mediated signaling by at least about 20%. In some embodiments, the antibody provided herein attenuates IL-23R mediated signaling by at least about 30%. In some embodiments, the antibody provided herein attenuates IL-23R mediated signaling by at least about 40%. In some embodiments, the antibody provided herein attenuates IL-23R mediated signaling by at least about 50%. In some embodiments, the antibody provided herein attenuates IL-23R mediated signaling by at least about 60%. In some embodiments, the antibody provided herein attenuates IL-23R mediated signaling by at least about 70%. In some embodiments, the antibody provided herein attenuates IL-23R mediated signaling by at least about 80%. In some embodiments, the antibody provided herein attenuates IL-23R mediated signaling by at least about 90%. In some embodiments, the antibody provided herein attenuates IL-23R mediated signaling by at least about 95%. In certain embodiments, the antibody described herein can attenuate (e.g., partially attenuate) IL-23R mediated signaling by at least about 15% to about 65%. In certain embodiments, the antibody described herein can attenuate (e.g., partially attenuate) IL-23R mediated signaling by at least about 20% to about 65%. In certain embodiments, the antibody described herein can attenuate (e.g., partially attenuate) IL-23R mediated signaling by at least about 30% to about 65%.

[0912] In some embodiments, the antibodies provided herein attenuate IL-23R binding to at least one of its ligands.

[0913] Another non-limiting example of an IL-23R activity is binding to IL-23. Thus, in certain embodiments, provided herein is a method of attenuating (e.g., partially attenuating) the binding of IL-23R to IL-23, comprising exposing a cell to an effective amount of an antibody or antigen binding fragment thereof provided herein.

[0914] In some embodiments, the antibody provided herein attenuates the binding of IL-23R to IL-23 by at least about 10%. In some embodiments, the antibody provided herein attenuates the binding of IL-23R to IL-23 by at least about 20%. In some embodiments, the antibody provided herein attenuates the binding of IL-23R to IL-23 by at least about 30%. In some embodiments, the antibody provided herein attenuates the binding of IL-23R to IL-23 by at least about 40%. In some embodiments, the antibody provided herein attenuates the binding of IL-23R to IL-23 by at least about 50%. In some embodiments, the antibody provided herein attenuates the binding of IL-23R to IL-23 by at least about 60%. In some embodiments, the antibody provided herein attenuates the binding of IL-23R to IL-23 by at least about 70%. In some embodiments, the antibody provided herein attenuates the binding of IL-23R to IL-23 by at least about 80%. In some embodiments, the antibody provided herein attenuates the binding of IL-23R to IL-23 by at least about 90%. In some embodiments, the antibody provided herein attenuates the binding of IL-23R to IL-23 by at least about 95%. In certain embodiments, the antibody described herein can attenuate (e.g., partially attenuate) the binding of IL-23R to IL-23 by at least about 15% to about 65%. In certain embodiments, the antibody described herein can attenuate (e.g., partially attenuate) the binding of IL-23R to IL-23 by at least about 20% to about 65%. In certain embodiments, the antibody described herein can attenuate (e.g., partially attenuate) the binding of IL-23R to IL-23 by at least about 30% to about 65%.

[0915] Yet another non-limiting example of an IL-23R activity is signaling mediated by IL-23. Thus, in certain embodiments, provided herein is a method of attenuating (e.g., partially attenuating) IL-23 mediated signaling in a cell, comprising exposing the cell to an effective amount of an antibody or antigen binding fragment thereof provided herein.

[0916] In some embodiments, the antibody provided herein attenuates IL-23 mediated signaling by at least about 10%. In some embodiments, the antibody provided herein attenuates IL-23 mediated signaling by at least about 20%. In some embodiments, the antibody provided herein attenuates IL-23 mediated signaling by at least about 30%. In some embodiments, the antibody provided herein attenuates IL-23 mediated signaling by at least about 40%. In some embodiments, the antibody provided herein attenuates IL-23 mediated signaling by at least about 50%. In some embodiments, the antibody provided herein attenuates IL-23 mediated signaling by at least about 60%. In some embodiments, the antibody provided herein attenuates IL-23 mediated signaling by at least about 70%. In some embodiments, the antibody provided herein attenuates IL-23 mediated signaling by at least about 80%. In some embodiments, the antibody provided herein attenuates IL-23 mediated signaling by at least about 90%. In some embodiments, the antibody provided herein attenuates IL-23 mediated signaling by at least about 95%. In certain embodiments, the antibody described herein can attenuate (e.g., partially attenuate) IL-23 mediated signaling by at least about 15% to about 65%. In certain embodiments, the antibody described herein can attenuate (e.g., partially attenuate) IL-23 mediated signaling by at least about 20% to about 65%. In certain embodiments, the antibody described herein can attenuate (e.g., partially attenuate) IL-23 mediated signaling by at least about 30% to about 65%.

### Diagnostic Assays and Methods of Detection

[0917] In one aspect, the anti-IL-23R antibodies and fragments thereof of the present disclosure are useful for detecting the presence of IL-23R in a biological sample. In an aspect, the anti-IL-23R antibodies and fragments thereof of the present disclosure are useful for detecting the presence of IL-23R on the surface of a cell or cells in a biological sample. In another aspect, the anti-IL-23R antibodies and fragments thereof of the present disclosure are useful for detecting the amount of IL-23R in a biological sample. In an aspect, the anti-IL-23R antibodies and fragments thereof of the present disclosure are useful for detecting the amount of IL-23R on the surface of a cell or cells in a biological sample. Such anti-IL-23R antibodies may include those that bind to human IL-23R but do not otherwise alter IL-23R signaling activity. The term “detecting” or “detection,” as used herein, encompasses quantitative or qualitative detection, and refers to using readouts or results of an assay to make a determination with regard to the presence/absence of IL-23R in the sample, the relative expression level IL-23R in the sample (e.g. relative to one or more reference expressions, relative to other samples, or relative to one or more expression scales), or the concentration of IL-23R in the sample. The detected readout from the assay can be numerical data, e.g. results of immunoassays, or a measured protein concentration; the detected readout can be non-numerical data, e.g. cells or tissues staining with anti-IL-23R antibodies in microscopy images or staining of IL-23R in an imaging flow cytometry; or the detected readout can be any experimental data that can be used as a proxy for the IL-23R expression as is well known to a person skilled in the art, e.g. fluorescent intensity, luminescence intensity, colorimetric readings, and absorption/emission spectroscopy. The detected readout in the assays is referred to herein as the signal of the assay.

[0918] In some embodiments, anti-IL-23R antibodies and fragments thereof of the present disclosure bind to the native receptor on cells. In some embodiments, anti-IL-23R antibodies and fragments thereof of the present disclosure bind to and alter the native receptor on cells. In some embodiments, anti-IL-23R antibodies and fragments thereof of the present disclosure bind to the denatured receptor on Western blots. In some embodiments, anti-IL-23R antibodies and fragments thereof of the present disclosure can be used to immunoprecipitate the receptor from cell lysates. In some embodiments, anti-IL-23R antibodies and fragments thereof of the present disclosure can be used to study the cellular synthesis of the IL-23 receptor. In some embodiments, anti-IL-23R antibodies and fragments thereof of the present disclosure can be used to study the trafficking of the IL-23 receptor. In some embodiments, anti-IL-23R antibodies and fragments thereof of the present disclosure can be used to study the turnover of the IL-23 receptor. In some embodiments, anti-IL-23R antibodies and fragments thereof of the present disclosure can be used to study the mechanism of action for how therapeutics affect the cellular synthesis of the IL-23 receptor. In some embodiments, anti-IL-23R antibodies and fragments thereof of the present disclosure can be used to study the mechanism of action for how therapeutics affect the trafficking of the IL-23 receptor. In some embodiments, anti-IL-23R antibodies and fragments thereof of the present disclosure can be used to study the mechanism of action for how therapeutics affect the turnover of the IL-23 receptor. In some embodiments, anti-IL-23R antibodies and fragments thereof of the present disclosure can be used in predicting drug mechanism of action and efficacious doses/exposures. In some embodiments, anti-IL-23R antibodies and fragments thereof of the present disclosure can be used in predicting efficacious doses/exposures of therapeutics.

[0919] In some embodiments, anti-IL-23R antibodies and fragments thereof of the present disclosure can be used to detect the IL-23 receptor on human cells. In some embodiments, anti-IL-23R antibodies and fragments thereof of the present disclosure can be used to detect the IL-23 receptor on human IL-23R transfected cell lines. In some embodiments, anti-IL-23R antibodies and fragments thereof of the present disclosure can be used to detect the IL-23 receptor on human IL-23R transfected iLite cell lines. In some embodiments, anti-IL-23R antibodies and fragments thereof of the present disclosure can be used to detect the IL-23 receptor on human IL-23R transfected HEK cell lines. In some embodiments, anti-IL-23R antibodies and fragments thereof of the present disclosure can be used to detect the IL-23 receptor on primary human CD3⁺ CD56⁻ T cells. In some embodiments, anti-IL-23R antibodies and fragments thereof of the present disclosure can be used to detect the IL-23 receptor on primary human CD3⁺ CD56⁺ cells. In some embodiments, anti-IL-23R antibodies and fragments thereof of the present disclosure can be used to detect the IL-23 receptor on primary human CD3⁻ CD56⁺ cells.

[0920] In some embodiments, anti-IL-23R antibodies and fragments thereof of the present disclosure can be used to detect the IL-23 receptor on human cells to identify IL-23-responsive cells. In some embodiments, anti-IL-23R antibodies and fragments thereof of the present disclosure can be used to detect the IL-23 receptor on human cells to quantify IL-23-responsive cells. In some embodiments, anti-IL-23R antibodies and fragments thereof of the present disclosure can be used to detect the IL-23 receptor on human cells to predict which diseases will respond to IL-23 pathway targeted inhibitors. In some embodiments, anti-IL-23R antibodies and fragments thereof of the present disclosure can be used to detect the IL-23 receptor on human cells to predict which patient subsets will respond to IL-23 pathway targeted inhibitors.

[0921] In some embodiments, anti-IL-23R antibodies and fragments thereof of the present disclosure can be used to label IL-23R-expresssing cells in healthy subjects and disease. In some embodiments, anti-IL-23R antibodies and fragments thereof of the present disclosure can be used to sort IL-23R-expresssing cells in healthy subjects and disease. In some embodiments, anti-IL-23R antibodies and fragments thereof of the present disclosure can be used to isolate IL-23R-expresssing cells in healthy subjects and disease. In some embodiments, anti-IL-23R antibodies and fragments thereof of the present disclosure can be used to characterize IL-23R-expresssing cells in healthy subjects and disease. In some embodiments, anti-IL-23R antibodies and fragments thereof of the present disclosure can be used to characterize the underlying disease pathways. In some embodiments, anti-IL-23R antibodies and fragments thereof of the present disclosure can be used to understand mechanism of action of therapeutics. In some embodiments, anti-IL-23R antibodies and fragments thereof of the present disclosure can be used to identify markers of response to drugs.

[0922] In some embodiments, anti-IL-23R antibodies and fragments thereof of the present disclosure bind to the IL-23R in such a manner that they inhibit IL-23 binding and signaling. In some embodiments, anti-IL-23R antibodies and fragments thereof of the present disclosure bind to the IL-23R in such a manner that they compete for binding with IL-23R antagonist peptide therapeutics. In some embodiments, anti-IL-23R antibodies and fragments thereof of the present disclosure are for use in receptor occupancy target engagement assays. In some embodiments, anti-IL-23R antibodies and fragments thereof of the present disclosure are for use in receptor occupancy target engagement assays in blood and other tissues of patients dosed with IL-23R antagonist peptides. In some embodiments, anti-IL-23R antibodies and fragments thereof of the present disclosure are for use in receptor occupancy target engagement assays in blood and other tissues of patients dosed with other receptor-targeted therapeutics. In some embodiments, anti-IL-23R antibodies and fragments thereof of the present disclosure are used in target engagement assays to inform dose prediction in a range of different diseases. In some embodiments, anti-IL-23R antibodies and fragments thereof of the present disclosure are used in target engagement assays to inform selection for future therapeutics in a range of different diseases.

[0923] In some embodiments, anti-IL-23R antibodies and fragments thereof of the present disclosure that bind to different epitopes on IL-23R that can be used in different combinations to optimize detection of IL-23R-expressing cells. In some embodiments, anti-IL-23R antibodies and fragments thereof of the present disclosure that bind to different epitopes on IL-23R that can be used in different combinations to optimize staining of IL-23R-expressing cells. In some embodiments, anti-IL-23R antibodies and fragments thereof of the present disclosure that bind to different epitopes on IL-23R that can be used in different combinations to optimize visualization of IL-23R-expressing cells. In some embodiments, anti-IL-23R antibodies and fragments thereof of the present disclosure that bind to different epitopes on IL-23R that can be used in different combinations to optimize quantitation of IL-23R-expressing cells.

[0924] In particular embodiments, IL-23R antibodies and fragments thereof, particularly antigen-binding fragments, that bind to different epitopes on IL-23R, such as those that are set out in distinct bins, including as provided in Table 11, are used to optimize evaluation and/or quantitation of IL-23R or IL-23R-expressing cells. In an embodiment, combinations of an antibody with strong cell surface IL-23R binding and an antibody that binds to a distinct epitope, such as from a different epitope bin, that is a non-competing and also demonstrates strong cell surface IL-23R binding are provided and may be particularly preferred.

[0925] In embodiments hereof, combinations of a Bin 3 antibody and a non-Bin3 antibody are contemplated and may be utilized. In embodiments hereof, combinations of a Bin 1 antibody and a non-Bin1 antibody are contemplated and may be utilized. In embodiments hereof, combinations of a Bin 5 antibody and a non-Bin5 antibody are contemplated and may be utilized. In embodiments hereof, combinations of a Bin 2 antibody and a non-Bin2 antibody are contemplated and may be utilized. In embodiments hereof, combinations of a Bin 4 antibody and a non-Bin4 antibody are contemplated and may be utilized. In embodiments hereof, combinations of a Bin 6 antibody and a non-Bin6 antibody are contemplated and may be utilized. In embodiments hereof, combinations of a Bin 7 antibody and a non-Bin7 antibody are contemplated and may be utilized. In embodiments hereof, combinations of a Bin 8 antibody and a non-Bin8 antibody are contemplated and may be utilized. In embodiments hereof, combinations of a Bin 9 antibody and a non-Bin9 antibody are contemplated and may be utilized. In embodiments, combinations of a Bin2 and a Bin 1 antibody, or of a Bin 1 and Bin5 antibody, or of a Bin 1 and Bin4 antibody, or a Bin 2 and Bin 4 antibody, or a Bin 2 and a Bin3 antibody, or a Bin 1 and Bin5 antibody, or a Bin 2 and Bin5 antibody, or a Bin3 and Bin 5 antibody, or a Bin 4 and Bin 5 antibody, or a Bin 3 and Bin 7 antibody, or a Bin1 and Bin 7 antibody, or combinations of a Bin3 antibody and a Bin 1 antibody are comtemplated and may be utilized.

[0926] Bin 1 antibodies comprise antibody that binds to the same epitope and/or binds IL-23R competitively with the antibody comprising: a VH comprising the amino acid sequence of SEQ ID NO:202 or comprising the CDR1, CDR2 and CDR3 domain sequences thereof, and a VL comprising the amino acid sequence of SEQ ID NO:203 or comprising the CDR1, CDR2 and CDR3 domain sequences thereof; a VH comprising the amino acid sequence of SEQ ID NO:252 or comprising the CDR1, CDR2 and CDR3 domain sequences thereof, and a VL comprising the amino acid sequence of SEQ ID NO:253 or comprising the CDR1, CDR2 and CDR3 domain sequences thereof; or a VH comprising the amino acid sequence of SEQ ID NO:156 or comprising the CDR1, CDR2 and CDR3 domain sequences thereof, and a VL comprising the amino acid sequence of SEQ ID NO:157 or comprising the CDR1, CDR2 and CDR3 domain sequences thereof. Bin 2 antibodies comprise antibody that binds to the same epitope and/or binds IL-23R competitively with the antibody comprising: a VH comprising the amino acid sequence of SEQ ID NO:192 or comprising the CDR1, CDR2 and CDR3 domain sequences thereof, and a VL comprising the amino acid sequence of SEQ ID NO:193 or comprising the CDR1, CDR2 and CDR3 domain sequences thereof; a VH comprising the amino acid sequence of SEQ ID NO:194 or comprising the CDR1, CDR2 and CDR3 domain sequences thereof, and a VL comprising the amino acid sequence of SEQ ID NO:195 or comprising the CDR1, CDR2 and CDR3 domain sequences thereof; a VH comprising the amino acid sequence of SEQ ID NO:200 or comprising the CDR1, CDR2 and CDR3 domain sequences thereof, and a VL comprising the amino acid sequence of SEQ ID NO:201 or comprising the CDR1, CDR2 and CDR3 domain sequences thereof; a VH comprising the amino acid sequence of SEQ ID NO:218 or comprising the CDR1, CDR2 and CDR3 domain sequences thereof, and a VL comprising the amino acid sequence of SEQ ID NO:219 or comprising the CDR1, CDR2 and CDR3 domain sequences thereof; a VH comprising the amino acid sequence of SEQ ID NO:222 or comprising the CDR1, CDR2 and CDR3 domain sequences thereof, and a VL comprising the amino acid sequence of SEQ ID NO:223 or comprising the CDR1, CDR2 and CDR3 domain sequences thereof; a VH comprising the amino acid sequence of SEQ ID NO:260 or comprising the CDR1, CDR2 and CDR3 domain sequences thereof, and a VL comprising the amino acid sequence of SEQ ID NO:261 or comprising the CDR1, CDR2 and CDR3 domain sequences thereof; a VH comprising the amino acid sequence of SEQ ID NO:264 or comprising the CDR1, CDR2 and CDR3 domain sequences thereof, and a VL comprising the amino acid sequence of SEQ ID NO:265 or comprising the CDR1, CDR2 and CDR3 domain sequences thereof; a VH comprising the amino acid sequence of SEQ ID NO:154 or comprising the CDR1, CDR2 and CDR3 domain sequences thereof, and a VL comprising the amino acid sequence of SEQ ID NO: 155 or comprising the CDR1, CDR2 and CDR3 domain sequences thereof; a VH comprising the amino acid sequence of SEQ ID NO:160 or comprising the CDR1, CDR2 and CDR3 domain sequences thereof, and a VL comprising the amino acid sequence of SEQ ID NO:161 or comprising the CDR1, CDR2 and CDR3 domain sequences thereof; or a VH comprising the amino acid sequence of SEQ ID NO: 164 or comprising the CDR1, CDR2 and CDR3 domain sequences thereof, and a VL comprising the amino acid sequence of SEQ ID NO: 165 or comprising the CDR1, CDR2 and CDR3 domain sequences thereof. Bin 3 antibodies comprise antibody that binds to the same epitope and/or binds IL-23R competitively with the antibody comprising: a VH comprising the amino acid sequence of SEQ ID NO:786 or comprising the CDR1, CDR2 and CDR3 domain sequences thereof, and a VL comprising the amino acid sequence of SEQ ID NO:787 or comprising the CDR1, CDR2 and CDR3 domain sequences thereof; a VH comprising the amino acid sequence of SEQ ID NO:790 or comprising the CDR1, CDR2 and CDR3 domain sequences thereof, and a VL comprising the amino acid sequence of SEQ ID NO:791 or comprising the CDR1, CDR2 and CDR3 domain sequences thereof; a VH comprising the amino acid sequence of SEQ ID NO:792 or comprising the CDR1, CDR2 and CDR3 domain sequences thereof, and a VL comprising the amino acid sequence of SEQ ID NO:793 or comprising the CDR1, CDR2 and CDR3 domain sequences thereof; a VH comprising the amino acid sequence of SEQ ID NO:236 or comprising the CDR1, CDR2 and CDR3 domain sequences thereof, and a VL comprising the amino acid sequence of SEQ ID NO:237 or comprising the CDR1, CDR2 and CDR3 domain sequences thereof; a VH comprising the amino acid sequence of SEQ ID NO:826 or comprising the CDR1, CDR2 and CDR3 domain sequences thereof, and a VL comprising the amino acid sequence of SEQ ID NO:827 or comprising the CDR1, CDR2 and CDR3 domain sequences thereof; or a VH comprising the amino acid sequence of SEQ ID NO:828 or comprising the CDR1, CDR2 and CDR3 domain sequences thereof, and a VL comprising the amino acid sequence of SEQ ID NO:829 or comprising the CDR1, CDR2 and CDR3 domain sequences thereof. Bin 4 antibodies comprise antibody that binds to the same epitope and/or binds IL-23R competitively with the antibody comprising: a VH comprising the amino acid sequence of SEQ ID NO:196 or comprising the CDR1, CDR2 and CDR3 domain sequences thereof, and a VL comprising the amino acid sequence of SEQ ID NO:197 or comprising the CDR1, CDR2 and CDR3 domain sequences thereof; a VH comprising the amino acid sequence of SEQ ID NO:262 or comprising the CDR1, CDR2 and CDR3 domain sequences thereof, and a VL comprising the amino acid sequence of SEQ ID NO:263 or comprising the CDR1, CDR2 and CDR3 domain sequences thereof; or a VH comprising the amino acid sequence of SEQ ID NO:152 or comprising the CDR1, CDR2 and CDR3 domain sequences thereof, and a VL comprising the amino acid sequence of SEQ ID NO:153 or comprising the CDR1, CDR2 and CDR3 domain sequences thereof. Bin 5 antibodies comprise antibody that binds to the same epitope and/or binds IL-23R competitively with the antibody comprising: a VH comprising the amino acid sequence of SEQ ID NO:798 or comprising the CDR1, CDR2 and CDR3 domain sequences thereof, and a VL comprising the amino acid sequence of SEQ ID NO:799 or comprising the CDR1, CDR2 and CDR3 domain sequences thereof. Bin 6 antibodies comprise antibody that binds to the same epitope and/or binds IL-23R competitively with the antibody comprising: a VH comprising the amino acid sequence of SEQ ID NO:206 or comprising the CDR1, CDR2 and CDR3 domain sequences thereof, and a VL comprising the amino acid sequence of SEQ ID NO:207 or comprising the CDR1, CDR2 and CDR3 domain sequences thereof; a VH comprising the amino acid sequence of SEQ ID NO:250 or comprising the CDR1, CDR2 and CDR3 domain sequences thereof, and a VL comprising the amino acid sequence of SEQ ID NO:251 or comprising the CDR1, CDR2 and CDR3 domain sequences thereof; a VH comprising the amino acid sequence of SEQ ID NO:144 or comprising the CDR1, CDR2 and CDR3 domain sequences thereof, and a VL comprising the amino acid sequence of SEQ ID NO:145 or comprising the CDR1, CDR2 and CDR3 domain sequences thereof; or a VH comprising the amino acid sequence of SEQ ID NO: 170 or comprising the CDR1, CDR2 and CDR3 domain sequences thereof, and a VL comprising the amino acid sequence of SEQ ID NO: 171 or comprising the CDR1, CDR2 and CDR3 domain sequences thereof. Bin 7 antibodies comprise antibody that binds to the same epitope and/or binds IL-23R competitively with the antibody comprising: a VH comprising the amino acid sequence of SEQ ID NO:150 or comprising the CDR1, CDR2 and CDR3 domain sequences thereof, and a VL comprising the amino acid sequence of SEQ ID NO:151 or comprising the CDR1, CDR2 and CDR3 domain sequences thereof. Bin 8 antibodies comprise antibody that binds to the same epitope and/or binds IL-23R competitively with the antibody comprising: a VH comprising the amino acid sequence of SEQ ID NO:198 or comprising the CDR1, CDR2 and CDR3 domain sequences thereof, and a VL comprising the amino acid sequence of SEQ ID NO:199 or comprising the CDR1, CDR2 and CDR3 domain sequences thereof; or a VH comprising the amino acid sequence of SEQ ID NO:240 or comprising the CDR1, CDR2 and CDR3 domain sequences thereof, and a VL comprising the amino acid sequence of SEQ ID NO:241 or comprising the CDR1, CDR2 and CDR3 domain sequences thereof. Bin 9 antibodies comprise antibody that binds to the same epitope and/or binds IL-23R competitively with the antibody comprising: a VH comprising the amino acid sequence of SEQ ID NO:204 or comprising the CDR1, CDR2 and CDR3 domain sequences thereof, and a VL comprising the amino acid sequence of SEQ ID NO:205 or comprising the CDR1, CDR2 and CDR3 domain sequences thereof; or a VH comprising the amino acid sequence of SEQ ID NO:884 or comprising the CDR1, CDR2 and CDR3 domain sequences thereof, and a VL comprising the amino acid sequence of SEQ ID NO:885 or comprising the CDR1, CDR2 and CDR3 domain sequences thereof.

[0927] In embodiments, combinations of a Bin3 antibody and a Bin 1 antibody are comtemplated and may be utilized. In some embodiments one or more of antibody selected from I23RB1, I23RB3, I23RB4, I23RB76, I23RB269 or I23RB270, or an antibody comprising the heavy and light chain CDRs, or at least the heavy chain CDRs, of one or more of I23RB1, I23RB3, I23RB4, I23RB76, I23RB269 or I23RB270, may be combined with one or more antibody selected from I23RB42, I23RB85 or I23RB157, or an antibody comprising the heavy and light chain CDRs, or at least the heavy chain CDRs, of one or more of I23RB42, I23RB85 or I23RB157. In particular embodiments, antibody I23RB4 or I23RB76 or an antibody comprising the heavy and light chain CDRs, or at least the heavy chain CDRs, of I23RB4 or I23RB76 is combined with antibody I23RB42 or I23RB157 or an antibody comprising the heavy and light chain CDRs, or at least the heavy chain CDRs, of I23RB42 or I23RB157.

[0928] In some embodiments, the affinity of the anti-IL-23R antibodies and fragments thereof of the present disclosure for human IL-23R can be determined using Surface Plasmon Resonance (SPR) methods. In some embodiments, the affinity of the anti-IL-23R antibodies and fragments thereof of the present disclosure for human IL-23R can be determined using Biolayer Interferometry (BLI) methods. In some embodiments, the affinity of the anti-IL-23R antibodies and fragments thereof of the present disclosure for human IL-23R can be determined using flow cytometry.

[0929] In some embodiments, the present disclosure provides a method for detecting, selecting and/or enriching IL-23R in a sample comprising contacting the sample with the unlabeled or labeled anti-IL-23R antibodies. In certain embodiments, the method comprising using unlabeled or labeled anti-IL-23R antibodies in an IHC assay, an immunoblotting assay, a flow cytometry assay, an ELISA, a radioimmunoassay, or high throughput screening assay.

[0930] In some embodiments, the present disclosure provides a method for detecting IL-23R target engagement by another therapeutic targeting IL-23R, e.g. another antibody, a peptide or a small molecule, to support dose decisions and indication decisions based on how much target engagement is achieved.

[0931] In one aspect, the present disclosure provides a method of detecting the presence of IL-23R in a biological sample. In certain embodiments, the method comprises contacting the biological sample with an anti-IL-23R antibody under conditions permissive for binding of the anti-IL-23R antibody to IL-23R, and detecting the binding between an anti-IL-23R antibody and IL-23R.

[0932] As provided herein, a biological sample are samples or materials that have a biological origin. Biological samples include bodily fluid, a cell or a tissue sample. In some embodiments, the cell can be a cultured cell line, engineered cells, in vitro or ex vivo culture of cells obtained from a subject, e.g. a human subject, or cells obtained from a subject. In other embodiments, the tissue samples can include bodily fluid or a tissue obtained from a subject, including a human subject. In some embodiments, the tissue samples include samples from a region of a subject suspected of having a disease. Thus tissue samples can be, but are not limited to, tissues, bodily fluid, tissue fractions, and/or cells isolated from an organism such as a mammal, in particular a human. In a particular embodiment, the tissue samples are prepared into sections that have been formalin fixed, paraffin embedded (FFPE). The cells, bodily fluid, and/or the tissue can be obtained from a subject, e.g. a human subject, by methods well known to a person skilled in the art, e.g. biopsy (including liquid biopsy), surgical procedures, cell smear, and phlebotomy.

[0933] As is well known to a person skilled in the art, the amount of an antibody bound to an antigen in a biological sample correlates with the amount of the antigen in the biological sample. Therefore the amount of binding of an anti-IL-23R antibody as provided herein to IL-23R in a biological sample can be used to measure the amount or the expression level of IL-23R in the biological sample. In some embodiments, the amount of IL-23R in the biological sample is detected in the linear detection range of the anti-IL-23R antibody. The “linear detection range” refers to the range of the amount or concentration of an antigen, within which the bound antibody linearly correlates with the amount or concentration of the antigen in the biological sample. Such linear range depends on factors such as the affinity between the antibody and the antigen, the concentration of the antibody used for the antibody-antigen binding, and the condition used for the antibody-antigen binding.

[0934] The concentration of the antibody used for antibody-antigen binding can be assessed in a titration experiments. In one embodiment of such titration experiments, the concentration of an antibody is serially diluted by a factor of twofold, threefold, fivefold, or tenfold, and the serially diluted antibodies were each bound to control samples with known amount of the corresponding antigen. In one embodiment, the desirable antibody concentration is that at which the amount of antibody binding differentiates the broadest linear detection range.

[0935] The expression of IL-23R in a biological sample refers to the amount of IL-23R in the biological sample at a given time. The expression of IL-23R as measured reflects accumulation of IL-23R in the biological sample over a period of time and can include degradation or modification products such as full length IL-23R, fragments of IL-23R, and naturally modified, e.g. glycosylated, IL-23R. As proteins are translated from mRNAs, the levels of mRNA in the biological samples can be used as a proxy for the expression of IL-23R in the biological samples.

[0936] Provided herein are methods for assessing IL-23R expression in a tissue sample from a subject suspected of having an IL-23R-associated disease, including: (a) contacting said tissue sample with an antibody or antigen binding fragment thereof as provided herein; (b) detecting the binding of said antibody or antigen binding fragment thereof to said tissue sample; (c) determining the expression of IL-23R in the tissue sample, wherein the expression level of IL-23R in the tissue sample is compared with a reference expression level of IL-23R.

[0937] Also provided herein are methods for assessing IL-23R expression in a tissue sample from a subject suspected of having an IL-23R-associated disease, including: (a) performing an IHC assay on the tissue sample with an antibody or antigen binding fragment thereof as provided herein; (b) determining the expression of IL-23R in the tissue sample, wherein the expression level of IL-23R in the tissue sample is compared with a reference expression level of IL-23R.

[0938] Provided herein are also methods of assessing responsiveness of a patient to a therapeutic agent, e.g., IL-23 pathway targeted inhibitors, said method based on IL-23R expression in a tissue sample from said patient, including: (a) contacting said tissue sample with an antibody or antigen binding fragment thereof as provided herein; (b) detecting the binding of said antibody or antigen binding fragment thereof to said tissue sample; (c) determining the expression of IL-23R in the tissue sample, wherein the expression level of IL-23R in the tissue sample is compared with a reference expression level of IL-23R; wherein an increased expression level of IL-23R compared to the reference is indicative of responsiveness to said therapy.

[0939] Provided herein are also methods for assessing responsiveness of patient to a therapeutic agent, e.g., IL-23 pathway targeted inhibitors, said method based on IL-23R expression in a tissue sample from said patient, including: (a) performing an IHC assay on the tissue sample with an antibody or antigen binding fragment thereof as provided herein; (b) determining the expression of IL-23R in the tissue sample, wherein the expression level of IL-23R in the tissue sample is compared with a reference expression level of IL-23R, wherein an increased expression level of IL-23R in the tissue sample compared to the reference is indicative of responsiveness to said therapy.

[0940] Provided herein are methods of treating an IL-23R-associated disease in a subject including (a) determining expression level of IL-23R in a tissue sample from the subject with an antibody or antigen binding fragment thereof as provided herein, wherein the expression level of IL-23R in the tissue sample is higher than a reference expression level of IL-23R; (b) administering a therapeutic agent to the subject.

[0941] Provided herein are methods of treating an IL-23R-associated disease in a subject including (a) contacting a tissue sample from the subject with an antibody or antigen binding fragment thereof as provided herein; (b) determining expression level of IL-23R in the tissue sample from the subject with antibody or antigen binding fragment thereof as provided herein, wherein the expression level of IL-23R in the tissue sample is higher than a reference expression level of IL-23R; (c) administering a therapeutic agent to the subject.

[0942] Provided herein are methods of treating an IL-23R-associated disease in a subject including (a) obtaining a tissue sample from the subject; (b) contacting the tissue sample from the subject with an antibody or antigen binding fragment thereof as provided herein; (c) determining expression level of IL-23R in a tissue sample from the subject with an antibody or antigen binding fragment thereof as provided herein, wherein the expression level of IL-23R in the tissue sample is higher than a reference expression level of IL-23R; (d) administering a therapeutic agent to the subject.

[0943] The subject in any of the method provided herein can be a human subject and the subject can have any IL-23R-associated disease for which the determination of IL-23R expression can be performed and/or for which IL-23R expression can provide diagnostic, prognostic, or predictive value. Exemplary IL-23R-associated diseases include multiple sclerosis, asthma, rheumatoid arthritis, inflammatory bowel disease (IBD), juvenile IBD, adolescent IBD, Crohn's disease, sarcoidosis, systemic elitematodes, ankylosing spondylitis, Autoimmune inflammation such as inflammation (axial spondylitic arthritis), psoriatic arthritis, or psoriasis and related diseases and disorders. In certain embodiments, the disease or disorder is psoriasis (eg, psoriasis vulgaris, guttate psoriasis), inverse psoriasis, pustular psoriasis, palmo-plantar, Psoriasis, psoriasis vulgaris, or psoriatic psoriasis, atopic dermatitis, acne ectopica, ulcerative colitis, Crohn's disease, Celiac's disease Sexual sprue, enteropathy with seronegative arthritis, microscopic colitis, collagen-accumulating colitis, eosinophilia gastroenteritis/esophagitis, colitis associated with radiation or chemotherapy, leukocyte adhesion deficiency-1 Psoriasis with congenital immunity disorders, chronic granulomatosis, glycogenosis type 1b, Hermannsky-Padrac syndrome, Chediac-East syndrome, Wiscot-Aldrich syndrome, rectal colon resection and ileal anastomosis, Later ileal psoriasis, gastrointestinal cancer, pancreatitis, insulin-dependent diabetes, mammary psoriasis, psoriasis, bile ductitis, primary biliary cirrhosis, virus-related enteropathy, periductitis, chronic bronchitis, chronic sinusitis, asthma, Psoriasis, or implant-to-host disease. Exemplary IL-23R-associated diseases include multiple sclerosis, asthma, rheumatoid arthritis, inflammation of the gut, inflammatory bowel diseases (IBDs), juvenile IBD, adolescent IBD, Crohn's disease, ulcerative colitis, Celiac disease (nontropical Sprue), microscopic colitis, collagenous colitis, eosinophilic gastroenteritis/esophagitis, colitis associated with radio- or chemo-therapy, colitis associated with disorders of innate immunity as in leukocyte adhesion deficiency-1, sarcoidosis, Systemic Lupus Erythematosus, ankylosing spondylitis (axial spondyloarthritis), psoriatic arthritis, psoriasis (e.g., plaque psoriasis, guttate psoriasis, inverse psoriasis, pustular psoriasis, Palmo-Plantar Pustulosis, psoriasis vulgaris, or erythrodermic psoriasis), atopic dermatitis, acne ectopica, enteropathy associated with seronegative arthropathies, chronic granulomatous disease, glycogen storage disease type 1b, Hermansky-Pudlak syndrome, Chediak-Higashi syndrome, Wiskott-Aldrich Syndrome, pouchitis, pouchitis resulting after proctocolectomy and ileoanal anastomosis, gastrointestinal cancer, pancreatitis, insulin-dependent diabetes mellitus, mastitis, cholecystitis, cholangitis, primary biliary cirrhosis, viral-associated enteropathy, pericholangitis, chronic bronchitis, chronic sinusitis, asthma, uveitis, or graft versus host disease. In some embodiments, the IL-23R-associated diseases are specifically selected from subset of inflammatory diseases, which include, but are not limited to psoriasis (PSO), psoriatic arthritis (PSA), inflammatory bowel disease (IBD), Crohn's disease (CD), or ulcerative colitis (UC). The disease or disorder may be an autoimmune disease. In some embodiments, the automimmine disease is selected from Ulcerative colitis (UC), Crohn's Disease (CD), psoriasis (PsO), or psoriatic arthritis (PsA).

[0944] As used herein, the term “responsiveness” refers to the probability of a cell or an individual or a patient or a subject responding or having a reaction to the treatment of a therapeutic agent. The responsiveness can include the probability of a wide range of reactions to the therapeutic agent, for example and without any limitation, (i) reduce or ameliorate the severity of the disease, disorder or condition to be treated or a symptom associated therewith; (ii) reduce the duration of the disease, disorder or condition to be treated, or a symptom associated therewith; (iii) prevent the progression of the disease, disorder or condition to be treated, or a symptom associated therewith; (iv) cause regression of the disease, disorder or condition to be treated, or a symptom associated therewith; (v) prevent the development or onset of the disease, disorder or condition to be treated, or a symptom associated therewith; (vi) prevent the recurrence of the disease, disorder or condition to be treated, or a symptom associated therewith; (vii) reduce hospitalization of a subject having the disease, disorder or condition to be treated, or a symptom associated therewith; (viii) reduce hospitalization length of a subject having the disease, disorder or condition to be treated, or a symptom associated therewith; (ix) increase the survival of a subject with the disease, disorder or condition to be treated, or a symptom associated therewith; (xi) inhibit or reduce the disease, disorder or condition to be treated, or a symptom associated therewith in a subject; and/or (xii) enhance or improve the prophylactic or therapeutic effect(s) of another therapy. In certain embodiments, the cell or tissue or individual or patient or subject is more likely to respond to a therapeutic agent, e.g., IL-23 pathway targeted inhibitors, when the cell, tissue, patient, or subject shows a significant expression IL-23R in its cells. In certain embodiments, the responsiveness increases with the increased level of IL-23R in cells. In certain embodiments, the responsiveness correlates with the level of IL-23R expression in cells. In certain embodiments, the responsiveness is linearly proportional to the level of IL-23R expression in cells. In other embodiments, the responsiveness of a cell, tissue, patient, or subject to a therapeutic agent can be 10%, 20%, 30%, 40%, 50%, 60%, 70%, 80%, 90%, 100%, 120%, 150%, 200%, 250%, 300%, 400%, 500%, 750%, 10 times, 15 times, 20 times, 30 times, 40 times, 50 times, 60 times, 70 times, 80 times, 90 times, 100 times, or more than the cells negative for IL-23R expression.

[0945] As used herein, “indicative of responsiveness” refers to a prediction that the responsiveness will be higher in one cell, tissue, human individual, or subject, over another cell, tissue, human individual, or subject. Such predictions are made based on certain criteria. In some embodiments, the prediction of the responsiveness is made based on the expression level of IL-23R in the cell, tissue, human individual, or subject. As described above, in certain embodiments, the cell or tissue or individual or patient or subject is predicted to be more likely to respond to a therapeutic agent, e.g., IL-23 pathway targeted inhibitors, when the cell, tissue, patient, or subject shows a significant expression of IL-23R in its cells. In certain embodiments, the responsiveness is predicted to increase with the increased level of IL-23R in its cells. In certain embodiments, the responsiveness is predicted to correlate with the level of IL-23R in its cells. In certain embodiments, the responsiveness is predicted to be linearly proportional to the level of IL-23R in its cells. In other embodiments, the responsiveness of a cell, tissue, patient, or subject to a therapeutic agent, e.g., IL-23 pathway targeted inhibitors, is predicted to be 10%, 20%, 30%, 40%, 50%, 60%, 70%, 80%, 90%, 100%, 120%, 150%, 200%, 250%, 300%, 400%, 500%, 750%, 10 times, 15 times, 20 times, 30 times, 40 times, 50 times, 60 times, 70 times, 80 times, 90 times, 100 times, or more than the cells negative for IL-23R expression.

[0946] The therapeutic agent can be any disease therapy for which IL-23R expression can provide diagnostic, prognostic, or predictive value. In certain embodiments, the therapeutic agent is one that targets biological processes, e.g. a signaling pathway, a metabolic pathway, or a protein synthesis/degradation pathway, in which IL-23R plays a role. In certain embodiments, the therapeutic agent is one that targets IL-23R activity, IL-23R signaling, or IL-23R mediated diseases. In a specific embodiment, the therapeutic agent is an anti-IL-23R antibody or an anti-IL-23R antibody drug conjugate.

[0947] For determining the expression of IL-23R in the tissue sample, the expression level of IL-23R in the tissue sample is compared or correlated with a reference expression level of IL-23R. The “reference expression level” as used herein refers to an expression level in a reference sample that, when compared with the IL-23R expression level in the test sample, provides relative information about IL-23R expression in the test sample. The reference expression level can be a known expression level, e.g. expression in a reference sample where the amount, concentration, and/or mole quantity of IL-23R is known. For example, the reference expression level can be the IL-23R expression in a cell line where the cells have been transfected or otherwise engineered to express a known amount of IL-23R. In some embodiments, reference expression level can be the IL-23R expression in a cell where the IL-23R expression has been quantitated by methods provided herein or known to a person skilled in the art, such as ELISA, SDS-PAGE, quantitative immunoprecipitation, and/or quantitative western blotting. In other embodiments, reference expression level involves more than one reference, such as 2, 3, 4, 5, 6, 7, 8, 9, 10, 12, 14, 16, 18, 20, 25, 30, 35, 40, 45, 50, 75, 100, and more references. In one embodiment, the reference level has 4 references: one negative for IL-23R expression, one with weak IL-23R expression, one with moderate IL-23R expression, and one with high/strong IL-23R expression.

[0948] Alternatively, a reference expression level can be a level where the exact concentration or quantity of IL-23R is unknown but the status, activity, and/or function of the reference sample is known. In some embodiments, the reference expression levels can be those of a non-diseased cell from the same patient that is suspected of having IL-23R-associated disease. In such embodiments, by comparing IL-23R expression in the test sample with that in the reference sample, the IL-23R expression in the test sample relative to (e.g. higher than, lower than, or substantially the same as) the IL-23R expression of the non-diseased cells can be determined. In other embodiments, the reference expression levels can be those of diseased cells, wherein by comparing IL-23R expression in the test sample with that in the reference sample, the IL-23R expression in the test sample relative to (e.g. higher than, lower than, or substantially the same as) the IL-23R expression of the diseased cells can be determined. In other embodiments, the reference expression levels can be those of a cell from a second subject, wherein by comparing IL-23R expression in the test sample with that in the reference sample, the IL-23R expression in the test sample relative to (e.g. higher than, lower than, or substantially the same as) the IL-23R expression of the cells from a second subject can be determined. The second subject can be a normal human subject having no IL-23R-associated disease, a human subject having the same kind of IL-23R-associated disease as that the patient is suspected of having, or a human subject having a different kind of IL-23R-associated disease from what the patient is suspected of having.

[0949] The reference sample and reference cells as described herein can be a cell line, in vitro or ex vivo culture of cells obtained from patient suspected of having IL-23R-associated disease, cells obtained from patient suspected of having IL-23R-associated disease, in vitro or ex vivo culture of cells obtained from a second subject, cells obtained from a second subject.

[0950] Therefore, in some embodiments of the methods provided herein, the reference expression level of IL-23R can be the IL-23R expression level in IL-23R-associated diseased cells, non-diseased cells of said subject, or non-diseased cells from a second subject.

[0951] As described above, in some embodiments, the IL-23R expression in a sample can be determined by correlating or comparing the anti-IL-23R antibody binding to the sample with the anti-IL-23R antibody binding to the negative and positive references, wherein the levels of IL-23R expression in the references are known. The reference IL-23R expression can be a positive IL-23R control or a negative IL-23R control. As used herein, a “positive IL-23R control” or a “positive control” refers to a cell, a tissue, a tumor, a human, and/or a subject known to express significant amount of IL-23R. A “negative IL-23R control” or “negative control” refers to cells and/or tissues known to express no IL-23R or low level of IL-23R such that the IL-23R in the cells or tissues are not biologically significant. IL-23R level is biologically insignificant when (1) a person skilled in the art would consider the level of IL-23R expression low in light of a protein product of a house keeping gene; (2) the presence or absence of the low amount of IL-23R does not make a biological difference to the cell or tissue; and (3) if these insignificant amount of IL-23R is removed or deleted from the cells or tissues, the cells or tissues will continue to function substantially the same way as before such removal or deletion. The known IL23R gene expression but not protein expression can be determined independently by a qPCR assay. The known IL-23R protein expression can also be independently determined using any below described immunoassays with an anti-IL-23R antibody that has been determined to be IL-23R specific, (e.g. an IL-23R specific antibody identified in the specificity-screening methods described above). Suitable immunoassays include, by way of example and without any limitation, an IHC assay, an immunoblotting assay, a FACS assay, or an ELISA. In some embodiments, the IL23R mRNA level may not be zero in the negative control due to the background noise of the assays or due to the biologically insignificant low level of remaining IL-23R. Negative IL-23R control can be properly considered negative for IL-23R, for example, when the IL23R mRNA level in a qPCR assay is substantially similar to the level of mRNA detected with a set of nonspecific primers, or when the IL23R mRNA level is biologically insignificant in light of the IL23R mRNA level in a positive IL-23R control. Similarly, the IL-23R detected by immunoassays using another IL-23R specific antibody in a negative control may not be zero due to background noise of the assays or due to the biologically insignificant low level of remaining IL-23R. The background noise can be caused by non-specific interactions between the assay reagents other than the anti-IL-23R antibodies and the samples. The negative IL-23R control can be properly considered negative for IL-23R, for example, when the IL-23R level in the negative control detected by the anti-IL-23R antibody is substantially similar to the detection level from an isotype control antibody in the same assay. In some assays, the background noise can account for a substantial percentage of the detected signal from the IL-23R expression.

[0952] Additionally, positive and negative controls have been identified and published in the literature by persons skilled in the art, including positive and/or negative tissues, cells (including, e.g. cell lines), and pathological samples. Such literature can be readily identified by searching databases such as PubMed (e.g. using search terms such as IL-23R, expression, positive, negative, and/or distribution) and analyzing the search hits.

[0953] Accordingly, the relative amount of the antibody or antigen-binding fragment thereof bound to a negative control cell with no IL-23R expression can be about 50%, 40%, 30%, 20%, 10%, 5%, 4%, 3%, 2%, 1%, 0.5%, 0.3%, 0.2%, 0.1%, 0.05%, 0.03%, 0.01%, 0.001% or less of the amount of the antibody or antigen-binding fragment thereof bound to the sample cell expressing IL-23R.

[0954] Therefore, in some embodiments of the methods provided herein, the reference expression level of IL-23R is the IL-23R expression level in a negative control, wherein the IL-23R expression in the negative control is independently determined by a qPCR assay, an IHC assay with a second antibody, an immunoblotting assay with a second antibody, a FACS assay with a second antibody, or an ELISA with a second antibody.

[0955] In other embodiments of the methods provided herein, the reference expression level of IL-23R is the IL-23R expression level in a positive control cell expressing IL-23R, wherein the IL-23R expression in the positive control is independently determined by a qPCR assay, an IHC assay with a second antibody, an immunoblotting assay with a second antibody, a FACS assay with a second antibody, or an ELISA with a second antibody.

[0956] The expression level of IL-23R in a sample can be different from that in a positive control. The relative amount of the antibody or antigen-binding fragment thereof bound to the tissue sample can be about 5%, 10%, 20%, 30%, 40%, 50%, 60%, 70%, 80%, 90%, 100%, 120%, 150%, 200%, 250%, 300%, 400%, 500%, 750%, 10 times, 15 times, 20 times, 30 times, 40 times, 50 times, 60 times, 70 times, 80 times, 90 times, 100 times, 200 times, 500 times, or more of the amount of the antibody or antigen-binding fragment thereof bound to the positive control cell expressing IL-23R.

[0957] Numerous different PCR or qPCR protocols are known in the art and exemplified herein below and can be directly applied or adapted for determining the IL23R mRNA level in the samples or controls, which can be used as a proxy for the expression levels of IL-23R protein in the samples or controls. Quantitative PCR (qPCR) (also referred as real-time PCR) is applied and adapted in some embodiments as it provides not only a quantitative measurement, but also reduced time and contamination. As used herein, “quantitative PCR (or “qPCR”) refers to the direct monitoring of the progress of PCR amplification as it is occurring without the need for repeated sampling of the reaction products. In quantitative PCR, the reaction products can be monitored via a signaling mechanism (e.g., fluorescence) as they are generated and are tracked after the signal rises above a background level but before the reaction reaches a plateau. The number of cycles required to achieve a detectable or “threshold” level of fluorescence varies directly with the concentration of amplifiable targets at the beginning of the PCR process, enabling a measure of signal intensity to provide a measure of the amount of target nucleic acid in a sample in real time. When qPCR is applied to determine mRNA expression level, an extra step of reverse-transcription of mRNA to DNA is performed before the qPCR analysis. Examples of PCR methods can be found in the literature (Wong et al., BioTechniques 39:75-85 (2005); D'haene et al., Methods 50:262-270 (2010)), which is incorporated by reference herein in its entirety. Examples of PCR assays can be found in U.S. Pat. No. 6,927,024, which is incorporated by reference herein in its entirety. Examples of RT-PCR methods can be found in U.S. Pat. No. 7,122,799, which is incorporated by reference herein in its entirety. A method of fluorescent in situ PCR is described in U.S. Pat. No. 7,186,507, which is incorporated by reference herein in its entirety.

[0958] In one specific embodiment, qPCR can be performed to determine or measure the IL23R mRNA levels as follows. Briefly, mean Ct (cycle threshold) values (or referred to herein interchangeably as Cq (quantification cycle)) of replicate qPCR reactions for IL23R and one or more housekeeping genes are determined. Mean Ct values for IL23R can be then normalized to the Ct values of the housekeeping genes using the following exemplary formula: IL23R-ΔCt=(mean Ct of IL23R-mean Ct of housekeeping gene A). The relative IL23R-ΔCt can then be used to determine relative level of IL23R mRNA, for example by using the formula of mRNA expression=2^{-ΔCt}. For a summary of Ct and Cq values, see MIQE guideline (Bustin et al., The MIQE Guidelines: Minimum Information for Publication of Quantitative Real-Time PCR Experiments, Clinical Chemistry 55:4 (2009)).

[0959] Other commonly used methods known in the art for the quantification of mRNA expression in a sample can also be used, including northern blotting and in situ hybridization (Parker & Barnes, Methods in Molecular Biology 106:247-283 (1999)); RNAse protection assays (Hod, Biotechniques 13:852-854 (1992)); microarrays (Hoheisel et al., Nature Reviews Genetics 7:200-210 (2006); Jaluria et al., Microbial Cell Factories 6:4 (2007)); and polymerase chain reaction (PCR) (Weis et al, Trends in Genetics 8:263-264 (1992)). Alternatively, levels of mRNA expression can be determined by sequencing techniques. Representative methods for sequencing-based gene expression analysis include Serial Analysis of Gene Expression (SAGE), and gene expression analysis by massively parallel signature sequencing (MPSS).

[0960] As described earlier, tissue samples can be, but are not limited to, tissues, bodily fluid, tissue fractions, and/or cells isolated from an organism such as a mammal, in particular a human. Therefore, tissue samples can be obtained from a variety of organs of a subject, including a human subject. In some embodiments, tissue samples are obtained from organs suspected of having a disease, dysfunction or disorder, such as an immune disease. In other embodiments, tissue samples are obtained from normal organs from the patient who is being tested or from a second human subject.

[0961] Anti-IL-23R antibodies bound to the samples can be detected by a variety of immunoassays known in the art, including an IHC approach, an immunoblotting assay, a FACS assay, and an ELISA.

[0962] IL-23R can be detected by an anti-IL-23R antibody in a variety of IHC approaches. IHC staining of tissue sections has been shown to be a reliable method of assessing or detecting the presence of proteins in a sample. IHC techniques utilize an antibody to probe and visualize cellular antigens in situ, generally by chromogenic or fluorescent methods. Primary antibodies or antisera, such as polyclonal antisera and monoclonal antibodies that specifically target IL-23R, can be used to detect expression in an IHC assay. In some embodiments, the tissue sample is contacted with a primary antibody for a specific target for a period of time sufficient for the antibody-target binding to occur. As discussed in detail earlier, the antibodies can be detected by direct labels on the antibodies themselves, for example, radioactive labels, fluorescent labels, hapten labels such as biotin, or an enzyme such as horse radish peroxidase or alkaline phosphatase. Alternatively, unlabeled primary antibody is used in conjunction with a labeled secondary antibody, comprising antisera, polyclonal antisera or a monoclonal antibody specific for the primary antibody. IHC protocols and kits are well known in the art and are commercially available. Automated systems for slide preparation and IHC processing are available commercially. The Leica BOND Autostainer and Leica Bond Refine Detection system is an example of such an automated system.

[0963] In some embodiments, an IHC assay is performed with an unlabeled primary antibody in conjunction with a labeled secondary antibody in an indirect assay. The indirect assay utilizes two antibodies for the detection of target proteins such as IL-23R in a tissue sample. First, an unconjugated primary antibody was applied to the tissue (first layer), which reacts with the target antigen in the tissue sample. Next, an enzyme-labeled secondary antibody is applied, which specifically recognizes the antibody isotype of the primary antibody (second layer). The secondary antibody reacts with the primary antibody, followed by substrate-chromogen application. The second-layer antibody can be labeled with an enzyme such as a peroxidase, which reacts with the chromogen 3, 3′-diaminobenzidine (DAB) to produce brown precipitate at the reaction site. This method is sensitive and versatile due to the potential signal amplification through a signal amplification system.

[0964] In certain embodiments to increase the sensitivity of the detection, a signal amplification system can be used. “A signal amplification system”, as used herein, means a system of reagents and methods that can be used to increase the signal from detecting the bound primary or the secondary antibody. A signal amplification system increases the sensitivity of the target protein detection, increases the detected signal, and decreases the lower boundary of the detection limits. There are several types of signal amplification systems including an enzyme labeling system and macrolabeling system. These systems/approaches are not mutually exclusive and can be used in combination for additive effect.

[0965] Macrolabels or macrolabeling system are collections of labels numbering in the tens (e.g. phycobiliproteins) to millions (e.g. fluorescent microspheres) attached to or incorporated in a common scaffold. The scaffold can be coupled to a target-specific affinity reagent such as an antibody, and the incorporated labels are thereby collectively associated with the target upon binding. The labels in the macrolabels can be any of the labels described herein such as fluorophores, haptens, enzymes, and/or radioisotopes. In one embodiment of the signal amplification system, a labeled chain polymer-conjugated secondary antibody was used. The polymer technology utilized an HRP enzyme-labeled inert “spine” molecule of dextran to which 1, 2, 3, 4, 5, 6, 7, 8, 9 10, 15, 20, 25, 30, 50 or more molecules of secondary antibodies can be attached, making the system even more sensitive.

[0966] Signal amplification system based on an enzyme labeling system utilizes the catalytic activity of enzymes, such as horseradish peroxidase (HRP) or alkaline phosphatase to generate high-density labeling of a target protein or nucleic acid sequence in situ. In one embodiment, tyramide can be used to increase the signal of HRP. In such a system, HRP enzymatically converts the labeled tyramide derivative into highly reactive, short-lived tyramide radicals. The labeled active tyramide radicals then covalently couple to residues (principally the phenol moiety of protein tyrosine residues) in the vicinity of the HRP-antibody-target interaction site, resulting in amplification of the number of labels at the site with minimal diffusion-related loss of signal localization. Consequently, the signal can be amplified 1, 2, 3, 4, 5, 6, 7, 8, 9 10, 15, 20, 25, 30, 50, 75, or 100 folds. As known to a person skilled in the art, the labels on the tyramide can be any labels described herein, including fluorophores, enzymes, haptens, radioisotopes, and/or photophores. Other enzyme-based reactions can be utilized to create signal amplification as well. For example, Enzyme-Labeled Fluorescence (ELF) signal amplification is available for alkaline phosphatase, wherein the alkaline phosphatase enzymatically cleaves a weakly blue-fluorescent substrate (ELF 97 phosphate) and converts it into a bright yellow-green-fluorescent precipitate that exhibits an unusually large Stokes shift and excellent photostability. Both tyramide-based signal amplification system and ELF signal amplification are available commercially, for example from ThermoFisher Scientific (Waltham, MA USA 02451).

[0967] Thus in some embodiments of the methods provided herein, the expression level of IL-23R is detected with a signal amplification system.

[0968] In some embodiments, the specimen is then counterstained to identify cellular and subcellular elements.

[0969] In some embodiments, the expression level of IL-23R can also be detected with antibodies described herein using an immunoblotting assay. In some embodiments of an immunoblotting assay proteins are often (but do not have to be) separated by electrophoresis and transferred onto membranes (usually nitrocellulose or PVDF membrane). Similar to the IHC assays, primary antibodies or antisera, such as polyclonal antisera and monoclonal antibodies that specifically target IL-23R, can be used to detect protein expression. In some embodiments, the membrane is contacted with a primary antibody for a specific target for a period of time sufficient for the antibody-antigen binding to occur and the bound antibodies can be detected by direct labels on the primary antibodies themselves, e.g. with radioactive labels, fluorescent labels, hapten labels such as biotin, or enzymes such as horseradish peroxidase or alkaline phosphatase. In other embodiments, unlabeled primary antibody is used in an indirect assay as described above in conjunction with a labeled secondary antibody specific for the primary antibody. As described herein, the secondary antibodies can be labeled, for example, with enzymes or other detectable labels such as fluorescent labels, luminescent labels, colorimetric labels, or radioisotopes. Immunoblotting protocols and kits are well known in the art and are commercially available. Automated systems for immunoblotting, e.g. iBind Western Systems for Western blotting (ThermoFisher, Waltham, MA USA 02451), are available commercially. Immunoblotting includes, but is not limited to, Western blot, in-cell Western blot, and dot blot. Dot blot is a simplified procedure in which protein samples are not separated by electrophoresis but are spotted directly onto a membrane. In cell Western blot involves seeding cells in microtiter plates, fixing/permeabilizing the cells, and subsequent detection with a primary labeled primary antibody or unlabeled primary antibody followed by labeled secondary antibody as described herein.

[0970] In other embodiments, the expression levels of IL-23R can also be detected with the antibodies described herein in a flow cytometry assay, including a fluorescence-activated cell sorting (FACS) assay. Similar to the IHC or immunoblotting assays, primary antibodies or antisera, such as polyclonal antisera and monoclonal antibodies that specifically target IL-23R, can be used to detect protein expression in a FACS assay. In some embodiments, cells are stained with primary antibodies against specific target protein for a period of time sufficient for the antibody-antigen binding to occur and the bound antibodies can be detected by direct labels on the primary antibodies, for example, fluorescent labels or hapten labels such as biotin on the primary antibodies. In other embodiments, unlabeled primary antibody is used in an indirect assay as described above in conjunction with a fluorescently labeled secondary antibody specific for the primary antibody. FACS provides a method for sorting or analyzing a mixture of fluorescently labeled biological cells, one cell at a time, based upon the specific light scattering and fluorescent characteristics of each cell. The flow cytometer thus detects and reports the intensity of the fluorchrome-tagged antibody, which indicates the expression level of the target protein. Therefore, the expression level of surface proteins (such as IL-23R) can be detected using antibodies against the target protein. Non-fluorescent cytoplasmic proteins can also be observed by staining permeablized cells. Methods for performing FACS staining and analyses are well known to a person skilled in the art and are described by Teresa S. Hawley and Robert G. Hawley in Flow Cytometry Protocols, Humana Press, 2011 (ISBN 1617379506, 9781617379505).

[0971] In other embodiments, the expression levels of IL-23R can also be detected using immunoassays such as an Enzyme Immune Assay (EIA) or an ELISA. Both EIA and ELISA assays are known in the art, e.g. for assaying a wide variety of tissues and samples, including blood, plasma, serum or bone marrow. A wide range of ELISA assay formats are available, see, e.g., U.S. Pat. Nos. 4,016,043, 4,424,279, and 4,018,653, which are hereby incorporated by reference in their entireties. These include both single-site and two-site or “sandwich” assays of the non-competitive types, as well as in the traditional competitive binding assays. These assays also include direct binding of a labeled antibody to a target protein. Sandwich assays are commonly used assays. A number of variations of the sandwich assay technique exist. For example, in a typical forward assay, an unlabeled antibody is immobilized on a solid substrate, and the sample to be tested brought into contact with the bound molecule. After a suitable period of incubation, for a period of time sufficient to allow formation of an antibody-antigen complex, a second antibody specific to the antigen, labeled with a reporter molecule capable of producing a detectable signal is then added and incubated, allowing time sufficient for the formation of another complex of antibody-antigen-labeled antibody. Any unreacted material is washed away, and the presence of the antigen is determined by observation of a signal produced by the reporter molecule. The results may either be qualitative, by simple observation of the visible signal, or may be quantitated by comparing with a control sample containing known amounts of target protein.

[0972] In some embodiments of the EIA or ELISA assays, an enzyme is conjugated to the second antibody. In other embodiments, fluorescently labeled secondary antibodies can be used in lieu of the enzyme-labeled secondary antibody to produce a detectable signal in ELISA assay format. When activated by illumination with light of a particular wavelength, the fluorochrome-labeled antibody adsorbs the light energy, inducing a state to excitability in the molecule, followed by emission of the light at a characteristic color visually detectable with a light microscope. As in the EIA and ELISA, the fluorescent labeled antibody is allowed to bind to the first antibody-target protein complex. After washing off the unbound reagent, the remaining tertiary complex is then exposed to the light of the appropriate wavelength, the fluorescence observed indicates the presence of the target protein of interest. Immunofluorescence and EIA techniques are both very well established in the art and are disclosed herein.

[0973] For the immunoassays described herein, any of a number of enzymes or non-enzyme labels can be utilized so long as the enzymatic activity or non-enzyme label, respectively, can be detected. The enzyme thereby produces a detectable signal, which can be utilized to detect a target protein. Particularly useful detectable signals are chromogenic or fluorogenic signals. Accordingly, particularly useful enzymes for use as a label include those for which a chromogenic or fluorogenic substrate is available. Such chromogenic or fluorogenic substrates can be converted by enzymatic reaction to a readily detectable chromogenic or fluorescent product, which can be readily detected and/or quantified using microscopy or spectroscopy. Such enzymes are well known to those skilled in the art, including but not limited to, horseradish peroxidase, alkaline phosphatase, □-galactosidase, glucose oxidase, and the like (see Hermanson, Bioconjugate Techniques, Academic Press, San Diego (1996)). Other enzymes that have well known chromogenic or fluorogenic substrates include various peptidases, where chromogenic or fluorogenic peptide substrates can be utilized to detect proteolytic cleavage reactions. The use of chromogenic and fluorogenic substrates is also well known in bacterial diagnostics, including but not limited to the use of □- and □-galactosidase, □-glucuronidase,6-phospho-□-D-galatoside 6-phosphogalactohydrolase, □-gluosidase, □-glucosidase, amylase, neuraminidase, esterases, lipases, and the like (Manafi et al., Microbiol. Rev. 55:335-348 (1991)), and such enzymes with known chromogenic or fluorogenic substrates can readily be adapted for use in methods of the present invention.

[0974] Various chromogenic or fluorogenic substrates to produce detectable signals are well known to those skilled in the art and are commercially available. Exemplary substrates that can be utilized to produce a detectable signal include, but are not limited to, 3,3′-diaminobenzidine (DAB), 3,3′,5,5′-tetramethylbenzidine (TMB), Chloronaphthol (4-CN)(4-chloro-1-naphthol), 2,2′-azino-bis(3-ethylbenzothiazoline-6-sulphonic acid) (ABTS), o-phenylenediamine dihydrochloride (OPD), and 3-amino-9-ethylcarbazole (AEC) for horseradish peroxidase; 5-bromo-4-chloro-3-indolyl-1-phosphate (BCIP), nitroblue tetrazolium (NBT), Fast Red (Fast Red TR/AS-MX), and p-Nitrophenyl Phosphate (PNPP) for alkaline phosphatase; 1-Methyl-3-indolyl-β-D-galactopyranoside and 2-Methoxy-4-(2-nitrovinyl)phenyl β-D-galactopyranoside for □-galactosidase; 2-Methoxy-4-(2-nitrovinyl)phenyl β-D-glucopyranoside for □-glucosidase; and the like. Exemplary fluorogenic substrates include, but are not limited to, 4-(Trifluoromethyl)umbelliferyl phosphate for alkaline phosphatase; 4-Methylumbelliferyl phosphate bis(2-amino-2-methyl-1,3-propanediol), 4-Methylumbelliferyl phosphate bis (cyclohexylammonium) and 4-Methylumbelliferyl phosphate for phosphatases; QuantaBlu™ and QuantaRed™ for horseradish peroxidase; 4-Methylumbelliferyl β-D-galactopyranoside, Fluorescein di(β-D-galactopyranoside) and Naphthofluorescein di-(β-D-galactopyranoside) for β-galactosidase; 3-Acetylumbelliferyl β-D-glucopyranoside and 4-Methylumbelliferyl-β-D-glucopyranoside for β-glucosidase; and 4-Methylumbelliferyl-α-D-galactopyranoside for α-galactosidase. Exemplary enzymes and substrates for producing a detectable signal are also described, for example, in US publication 2012/0100540. Various detectable enzyme substrates, including chromogenic or fluorogenic substrates, are well known and commercially available (Pierce, Rockford IL; Santa Cruz Biotechnology, Dallas TX; Invitrogen, Carlsbad CA; 42 Life Science; Biocare). Generally, the substrates are converted to products that form precipitates that are deposited at the site of the target nucleic acid. Other exemplary substrates include, but are not limited to, HRP-Green (42 Life Science), Betazoid DAB, Cardassian DAB, Romulin AEC, Bajoran Purple, Vina Green, Deep Space Black™, Warp Red™, Vulcan Fast Red and Ferangi Blue from Biocare (Concord CA; biocare.net/products/detection/chromogens).

[0975] In some embodiments of the immunoassays, a detectable label can be directly coupled to either the primary antibody or the secondary antibody that detects the unlabeled primary antibody can have. Exemplary detectable labels are well known to those skilled in the art, including but not limited to chromogenic or fluorescent labels (see Hermanson, Bioconjugate Techniques, Academic Press, San Diego (1996)). Exemplary fluorophores useful as labels include, but are not limited to, rhodamine derivatives, for example, tetramethylrhodamine, rhodamine B, rhodamine 6G, sulforhodamine B, Texas Red (sulforhodamine 101), rhodamine 110, and derivatives thereof such as tetramethylrhodamine-5-(or 6), lissamine rhodamine B, and the like; 7-nitrobenz-2-oxa-1,3-diazole (NBD); fluorescein and derivatives thereof; napthalenes such as dansyl (5-dimethylaminonapthalene-1-sulfonyl); coumarin derivatives such as 7-amino-4-methylcoumarin-3-acetic acid (AMCA), 7-diethylamino-3-[(4′-(iodoacetyl)amino)phenyl]-4-methylcoumarin (DCIA), Alexa fluor dyes (Molecular Probes), and the like; 4,4-difluoro-4-bora-3a,4a-diaza-s-indacene (BODIPY™) and derivatives thereof (Molecular Probes; Eugene Oreg.); pyrenes and sulfonated pyrenes such as Cascade Blue™ and derivatives thereof, including 8-methoxypyrene-1,3,6-trisulfonic acid, and the like; pyridyloxazole derivatives and dapoxyl derivatives (Molecular Probes); Lucifer Yellow (3,6-disulfonate-4-amino-naphthalimide) and derivatives thereof; CyDye™ fluorescent dyes (Amersham/GE Healthcare Life Sciences; Piscataway NJ), and the like. Exemplary chromophores include, but are not limited to, phenolphthalein, malachite green, nitroaromatics such as nitrophenyl, diazo dyes, dabsyl (4-dimethylaminoazobenzene-4′-sulfonyl), and the like.

[0976] Methods well known to a person skilled in the art such as microscopy or spectroscopy can be utilized to visualize chromogenic or fluorescent detectable signals associated with the bound primary or secondary antibodies.

[0977] “Determining the expression of IL-23R” refers to putting the expression of IL-23R in the test biological sample in a referenced system (or a referenced scale) so that a person familiar with the referenced system can tell the relative expression of IL-23R in the test sample with respect to other samples that have been positioned in the referenced system. Consequently, such a determination involves comparing the expression of IL-23R in the test tissue sample with a reference expression level of IL-23R.

[0978] In some embodiments, the referenced system can be a quantitative system where the actual molar concentration or mole quantity of IL-23R in the test sample is compared with the molar concentration or mole quantity of the reference expression levels. In some embodiments, other surrogate numerical measurements that are linearly proportional to the molar concentration or mole quantity can be used. Examples of these surrogate measurements include fluorescence intensity measurements of bound antibodies, luminescence intensity measurements of bound antibodies, radioactivity measurements of bound antibodies, and/or colorimetric or chromogenic measurements of bound antibodies.

[0979] In other embodiments, the referenced system can be a categorization system. A categorization system can have as few as 2 categories and as many as 3, 4, 5, 6, 7, 8, 9, 10, 12, 14, 16, 18, 20, 25, 30, 35, 40, 45, 50, 75, 100, or more categories. In one embodiment, the referenced system has a positive category for samples that are positive for IL-23R expression (positive) and a negative category for samples that are negative for IL-23R expression (negative). In such a categorization system, determining the expression of IL-23R in a test sample involves comparing the expression of IL-23R in the test sample with IL-23R expression of a positive reference sample and/or with a negative reference, and placing the test sample in the positive category if the test sample expresses IL-23R at a similar or higher level than the positive reference. In another embodiment, the categorization system has 3 categories, e.g. negative, medium, and high expression categories. In another embodiment, the categorization system has 4 categories, e.g. negative, low/weak, medium/moderate, and high/strong expression categories. In some aspects, determining the expression of IL-23R in a test sample involves comparing the expression of IL-23R in the test sample with one or more references of IL-23R expression of known categories and placing the test sample in a category according to its relative expression to the reference(s).

[0980] In some embodiments, the referenced system can be a scoring system. A scoring system can be similar to a categorization system except that the categories are replaced by a score. For example, a 2-category system of negative and positive IL-23R expression can be a scoring system of 0 and 1, where 0 means negative and 1 means positive. In another embodiment, a 3-category system can be a scoring system of 0, 1, and 2, wherein 0 is negative, 1 is low/weak expression, and 2 is medium/moderate and high/strong expression. In another embodiment, a 4-category system can be a scoring system of 0, 1, 2, and 3, where in 0 is negative, 1 is low/weak, 2 is medium/moderate, and 3 is high/strong expression. Similar to the categorization system, determining the expression of IL-23R in a test sample in the scoring system involves comparing the expression of IL-23R in the test sample with one or more references of IL-23R expression having a known score and assigning the test sample a score according to its relative expression to the references. The scoring system, however, can be scores of discontinuous and discrete numbers (e.g. a system of 0, 2, 4, 6, 8, and 10, or a system of 1, 4, 6, 11, 13, and 19), numbers with fractions (e.g. 1, 1.5, 2, 2.5, 3, 3.5 etc), negative numbers, numbers starting from any number (e.g. 1000, 2000, 3000, etc), and any set of numbers that can be used to track the relative protein expression in biological samples.

[0981] In some embodiments, the referenced system can be percentages of cells in conjunction with the categorization or scoring systems. The combination of percentage of cells with a categorization or scoring system provides finer gradation of the samples. In such a combined system, each cell from the biological sample is assigned or placed in the categorization or scoring system, and the approximate percentage of cells of the test sample in each category or score is determined. In one example, measurements of percentages of cells can be coupled with a 2-category system of positive and negative IL-23R expression, wherein the sample is not measured as a whole but break into the percentage of cells that are positive for IL-23R expression and percentage of cells that are negative for IL-23R expression. For example, in a 2-category system of positive and negative IL-23R expression, a test sample may be negative for IL-23R expression if placed in a 2 category system but have 10% cells positive for IL-23R expression and 90% of cells negative for IL-23R expression. In one embodiment, the referenced system includes percentages of cells in conjunction with a 2-category or 2-score system. In one embodiment, the referenced system includes percentages of cells in conjunction with a 3-category or 3-score system. In one embodiment, the referenced system includes percentages of cells in conjunction with a 4-category or 4-score system. In one embodiment, the referenced system includes percentages of cells in conjunction with a 5-category or 5-score system. In one embodiment, the referenced system includes percentages of cells in conjunction with a 6-category or 6-score system. In one embodiment, the referenced system includes percentages of cells in conjunction with a 7-category or 7-score system. In one embodiment, the referenced system includes percentages of cells in conjunction with an 8-category or 8-score system. In one embodiment, the referenced system includes percentages of cells in conjunction with a 9-category or 9-score system. In one embodiment, the referenced system includes percentages of cells in conjunction with a 10-category or 10-score system. In one embodiment, the referenced system includes percentages of cells in conjunction with any categorization or any scoring system. In one embodiment, the referenced system includes percentages of cells in conjunction with a 4-score system comprising 0 (negative for IL-23R), 1 (low/weak IL-23R expression), 2 (medium/moderate IL-23R expression), and 3 (high/strong IL-23R expression).

[0982] In some aspects, the referenced system can be a ratio of the IL-23R expression to the expression of at least one reference protein. In some embodiments, the ratio could be a ratio of quantitative measurements of IL-23R expression and those of a reference protein, wherein the quantitative measurements include those described herein such as molar concentration, mole quantity, fluorescence intensity measurements of bound antibodies, luminescence intensity measurements of bound antibodies, radioactivity measurements of bound antibodies, and/or colorimetric or chromogenic measurements of bound antibodies. In other embodiments, the ratio could also be a ratio of scores assigned to IL-23R expression and the reference protein according to any scoring system provided herein. A reference protein could be a protein of ordinary cell function such as actin, GAPDH, GDI, or any protein expressed by a house-keeping gene. For example, if a test sample has a score of 3 for IL-23R expression and score of 1 for expression of actin, the ratio can be determined to be 3.

[0983] In other aspects, the reference system can utilize the results of a mathematical function using one or more of the categorization, score, ratio, percentage, and quantitative measurement as input. In some embodiments, the mathematical function uses compounding, addition, multiplication, or combination these operators to combine the various inputs to produce results that provide more detailed information about IL-23R expression in the sample and/or finer gradation on the IL-23R expression scale. In one embodiment, the mathematical function calculates an H score based on the combination of percentage and a 4-score system. For example, an H-score was calculated by summing the products of the percentage of cells (0-100) having each IL-23R expression score (0=negative, 1=low/weak, 2=moderate/medium, and 3=high/strong). For example: a specimen with 10% of cells scoring 3, 30% of cells scoring 2, 20% of cells scoring 1, and 40% of cells scoring 0 would have an H-score of (3×10)+(2×30)+(1×20)+(0×40)=110.

[0984] Therefore, as provided herein, the expression level of IL-23R can be determined using a categorization system, a scoring system, a ratio of IL-23R expression to the expression of at least one reference protein, percentage of cells in said categorization or scoring system, a quantitative measurement of IL-23R staining signal, or a result of a mathematical function using one or more of said categorization, score, ratio, percentage, and quantitative measurement as input.

[0985] Most formalin-fixed tissues require an antigen retrieval step before immunohistochemical staining. Methylene bridges formed during fixation cross-link proteins and mask the epitopes of the antigens. Antigen retrieval methods break these methylene bridges and expose the epitopes, allowing antibodies to bind. In some embodiments, antigens are retrieved by a heat induced epitope retrieval (HIER) method. In other embodiments, antigens are retrieved by an enzymatic retrieval (e.g. proteolytic digestion) method. For HIER, formalin-fixed, paraffin-embedded (FFPE) tissue sections can be heated at 50° C., 55° C., 60° C., 65° C., 70° C., 75° C., 80° C., 85° C., 90° C., 95° C., 100° C., 105° C., 110° C., 115° C., 120° C., 125° C., or 130° C. The FFPE tissue section can be heated at any of these temperatures for 5, 10, 15, 20, 25, 30, 35, 40, 45, 50, 55, 60, 65, 70, 75, 80, 85, 90, 95, 100, 105, 110, 115, 120, 150, 180, 240, 300, 360, 420, 480, 540, 600, 660, 720, 780, 840, 900, 960, 1020, 1080, 1140, 1200, 1260, 1320, 1380, and 1440 minutes. The HIER procedure at any of the aforementioned temperatures and for any of the aforementioned durations can be performed in a solution having a pH of 2, 2.5, 3, 3.5, 4, 4.5, 5, 5.2, 5.4, 5.6, 5.8, 6.0, 6.2, 6.4, 6.6, 6.8, 7, 7.2, 7.4, 7.6, 7.8, 8, 8.2, 8.4, 8.6, 8.8, 9, 9.2, 9.4, 9.6, 9.8, 10, 10.2, 10.4, 10.6, 10.8, 11, 11.5, or 12. In some embodiments, the HIER can be performed at a temperature selected from a group consisting of 80° C., 85° C., 90° C., 95° C., 100° C., 105° C., 110° C., 115° C., for a duration selected from a group consisting of 5, 10, 15, 20, 25, 30, 35, 40, and at a pH selected from a group consisting of 8, 8.2, 8.4, 8.6, 8.8, 9, 9.2, 9.4, 9.6, 9.8, 10, 10.2, 10.4.

[0986] Thus, the methods provided herein further include a step of retrieving the epitope of IL-23R by heat-induced epitope retrieval (HIER).

[0987] Unlabeled antibodies, labeled antibodies and derivatives and analogs thereof, which immunospecifically bind to an IL-23R antigen can be used for diagnostic purposes to detect, diagnose, or monitor an IL-23R-mediated disease. Thus, provided herein are methods for the detection of an IL-23R-mediated disease comprising: (a) assaying the expression of an IL-23R antigen in cells or a tissue sample of a subject using one or more antibodies provided herein that immunospecifically bind to the IL-23R antigen; and (b) comparing the level of the IL-23R antigen with a control level, e.g., levels in normal tissue samples (e.g., from a patient not having an IL-23R-mediated disease, or from the same patient before disease onset), whereby an increase in the assayed level of IL-23R antigen compared to the control level of the IL-23R antigen is indicative of an IL-23R-mediated disease.

[0988] Also provided herein is a diagnostic assay for diagnosing an IL-23R-mediated disease comprising: (a) assaying for the level of an IL-23R antigen in cells or a tissue sample of an individual using one or more antibodies provided herein that immunospecifically bind to an IL-23R antigen; and (b) comparing the level of the IL-23R antigen with a control level, e.g., levels in normal tissue samples, whereby an increase in the assayed IL-23R antigen level compared to the control level of the IL-23R antigen is indicative of an IL-23R-mediated disease. In certain embodiments, provided herein is a method of treating an IL-23R-mediated disease in a subject, comprising: (a) assaying for the level of an IL-23R antigen in cells or a tissue sample of the subject using one or more antibodies provided herein that immunospecifically bind to an IL-23R antigen; and (b) comparing the level of the IL-23R antigen with a control level, e.g., levels in normal tissue samples, whereby an increase in the assayed IL-23R antigen level compared to the control level of the IL-23R antigen is indicative of an IL-23R-mediated disease. In some embodiments, the method further comprises (c) administering an effective amount of an antibody provided herein to the subject identified as having the IL-23R-mediated disease. A more definitive diagnosis of an IL-23R-mediated disease may allow health professionals to employ preventative measures or aggressive treatment earlier thereby preventing the development or further progression of the IL-23R-mediated disease.

[0989] Antibodies provided herein can be used to assay IL-23R antigen levels in a biological sample using classical immunohistological methods as described herein or as known to those of skill in the art (e.g., see Jalkanen et al., 1985, J. Cell. Biol. 101:976-985; and Jalkanen et al., 1987, J. Cell. Biol. 105:3087-3096). Other antibody-based methods useful for detecting protein gene expression include immunoassays, such as the enzyme linked immunosorbent assay (ELISA) and the radioimmunoassay (RIA). Suitable antibody assay labels are known in the art and include enzyme labels, such as, glucose oxidase; radioisotopes, such as iodine (1251, 1211), carbon (14C), sulfur (35S), tritium (3H), indium (121In), and technetium (99Tc); luminescent labels, such as luminol; and fluorescent labels, such as fluorescein and rhodamine, and biotin.

[0990] One aspect provided herein is the detection and diagnosis of an IL-23R-mediated disease in a human. In one embodiment, diagnosis comprises: a) administering (for example, parenterally, subcutaneously, or intraperitoneally) to a subject an effective amount of a labeled antibody that immunospecifically binds to an IL-23R antigen; b) waiting for a time interval following the administering for permitting the labeled antibody to concentrate at sites in the subject where the IL-23R antigen is expressed (and for unbound labeled molecule to be cleared to background level); c) determining background level; and d) detecting the labeled antibody in the subject, such that detection of labeled antibody above the background level indicates that the subject has an IL-23R-mediated disease. Background level can be determined by various methods including, comparing the amount of labeled molecule detected to a standard value previously determined for a particular system.

[0991] It will be understood in the art that the size of the subject and the imaging system used will determine the quantity of imaging moiety needed to produce diagnostic images. In the case of a radioisotope moiety, for a human subject, the quantity of radioactivity injected will normally range from about 5 to 20 millicuries of 99Tc. The labeled antibody will then accumulate at the location of cells which contain the specific protein. In vivo tumor imaging is described in S. W. Burchiel et al., “Immunopharmacokinetics of Radiolabeled Antibodies and Their Fragments.” (Chapter 13 in Tumor Imaging: The Radiochemical Detection of Cancer, S. W. Burchiel and B. A. Rhodes, eds., Masson Publishing Inc. (1982).

[0992] Depending on several variables, including the type of label used and the mode of administration, the time interval following the administration for permitting the labeled antibody to concentrate at sites in the subject and for unbound labeled antibody to be cleared to background level is 6 to 48 hours or 6 to 24 hours or 6 to 12 hours. In another embodiment, the time interval following administration is 5 to 20 days or 5 to 10 days.

[0993] In one embodiment, monitoring of an IL-23R-mediated disease is carried out by repeating the method for diagnosing the IL-23R-mediated disease, for example, one month after initial diagnosis, six months after initial diagnosis, one year after initial diagnosis, etc.

[0994] Presence of the labeled molecule can be detected in the subject using methods known in the art for in vivo scanning. These methods depend upon the type of label used. Skilled artisans will be able to determine the appropriate method for detecting a particular label. Methods and devices that may be used in the diagnostic methods provided herein include, but are not limited to, computed tomography (CT), whole body scan such as position emission tomography (PET), magnetic resonance imaging (MRI), and sonography.

[0995] In a specific embodiment, the molecule is labeled with a radioisotope and is detected in the patient using a radiation responsive surgical instrument (Thurston et al., U.S. Pat. No. 5,441,050). In another embodiment, the molecule is labeled with a fluorescent compound and is detected in the patient using a fluorescence responsive scanning instrument. In another embodiment, the molecule is labeled with a positron emitting metal and is detected in the patient using positron emission-tomography. In yet another embodiment, the molecule is labeled with a paramagnetic label and is detected in a patient using magnetic resonance imaging (MRI).

### Methods of Therapeutic Use

[0996] In another aspect, provided herein is a method of treating a disease or disorder in a subject comprising administering to the subject an effective amount of an antibody or antigen binding fragment thereof provided herein. In one embodiment, the disease or disorder is an IL-23R-mediated disease or disorder. In one embodiment, the disease or disorder is an IL-23-associated disease or disorder. Also provided herein is a method of treatment of a disease or disorder, wherein the subject is administered one or more therapeutic agents in combination with the antibody or antigen-binding fragment thereof provided herein.

[0997] The disclosure also relates to methods of using the antibodies provided herein to inhibit, i.e. antagonize, function of IL-23R in order to inhibit STAT activation. In some embodiments, the antibodies provided herein inhibit function of IL-23R in order to inhibit STAT3 activation. In some embodiments, the antibodies provided herein inhibit STAT3 phosphorylation.

[0998] The disclosure also to a method of treating or preventing an IL-23R associated disease or disorder in a subject in need thereof, comprising administering to the subject an isolated monoclonal antibody or antigen binding fragment thereof that specifically binds IL-23R or a pharmaceutical composition of the invention. The disclosure also relates to a method of treating or preventing an autoimmune disease in a subject in need thereof, comprising administering to the subject an isolated monoclonal antibody or antigen binding fragment thereof that specifically binds IL-23R or a pharmaceutical composition of the invention. In some embodiments, the autoimmune disease is selected from subset of inflammatory diseases, which include, but are not limited to psoriasis (PSO), psoriatic arthritis (PSA), inflammatory bowel disease (IBD), Crohn's disease (CD), or ulcerative colitis (UC).

[0999] The pharmaceutical composition comprises a therapeutically effective amount of an anti-IL-23R antibody or antigen binding fragment thereof. As used herein, the term “therapeutically effective amount” refers to an amount of an active ingredient or component that elicits the desired biological or medicinal response in a subject. A therapeutically effective amount can be determined empirically and in a routine manner, in relation to the stated purpose.

[1000] As used herein with reference to anti-IL-23R antibodies or antigen-binding fragments thereof, a therapeutically effective amount means an amount of the anti-IL-23R antibody or antigen-binding fragment thereof that modulates an immune response in a subject in need thereof.

[1001] A therapeutically effective amount refers to the amount of therapy which is sufficient to achieve one, two, three, four, or more of the following effects: (i) reduce or ameliorate the severity of the disease, disorder or condition to be treated or a symptom associated therewith; (ii) reduce the duration of the disease, disorder or condition to be treated, or a symptom associated therewith; (iii) prevent the progression of the disease, disorder or condition to be treated, or a symptom associated therewith; (iv) cause regression of the disease, disorder or condition to be treated, or a symptom associated therewith; (v) prevent the development or onset of the disease, disorder or condition to be treated, or a symptom associated therewith; (vi) prevent the recurrence of the disease, disorder or condition to be treated, or a symptom associated therewith; (vii) reduce hospitalization of a subject having the disease, disorder or condition to be treated, or a symptom associated therewith; (viii) reduce hospitalization length of a subject having the disease, disorder or condition to be treated, or a symptom associated therewith; (ix) increase the survival of a subject with the disease, disorder or condition to be treated, or a symptom associated therewith; (xi) inhibit or reduce the disease, disorder or condition to be treated, or a symptom associated therewith in a subject; and/or (xii) enhance or improve the prophylactic or therapeutic effect(s) of another therapy.

[1002] The therapeutically effective amount or dosage can vary according to various factors, such as the disease, disorder or condition to be treated, the means of administration, the target site, the physiological state of the subject (including, e.g., age, body weight, health), whether the subject is a human or an animal, other medications administered, and whether the treatment is prophylactic or therapeutic. Treatment dosages are optimally titrated to optimize safety and efficacy.

[1003] According to particular embodiments, the compositions described herein are formulated to be suitable for the intended route of administration to a subject. For example, the compositions described herein can be formulated to be suitable for intravenous, subcutaneous, or intramuscular administration.

[1004] As used herein, the terms “treat,” “treating,” and “treatment” are all intended to refer to an amelioration or reversal of at least one measurable physical parameter related to an autoimmune disease or disorder (e.g., psoriasis), which is not necessarily discernible in the subject, but can be discernible in the subject. The terms “treat,” “treating,” and “treatment,” can also refer to causing regression, preventing the progression, or at least slowing down the progression of the disease, disorder, or condition. In a particular embodiment, “treat,” “treating,” and “treatment” refer to an alleviation, prevention of the development or onset, or reduction in the duration of one or more symptoms associated with the disease, disorder, or condition, such as an autoimmune disorder (e.g., psoriasis). In a particular embodiment, “treat,” “treating,” and “treatment” refer to prevention of the recurrence of the disease, disorder, or condition. In a particular embodiment, “treat,” “treating,” and “treatment” refer to an increase in the survival of a subject having the disease, disorder, or condition. In a particular embodiment, “treat,” “treating,” and “treatment” refer to elimination of the disease, disorder, or condition in the subject.

[1005] According to particular embodiments, provided are compositions used in the treatment or prevention of an autoimmune disease. For an autoimmune therapy, the compositions can be used in combination with another treatment including, but not limited to, a chemotherapy, an anti-HLA-Cw6 mAb, anti-IL-23 mAb, an anti-TNF-alpha mAb, an anti-IL-17A mAb, other autoimmune disease drugs, an antibody-drug conjugate (ADC), or a targeted therapy. Anti-IL-23R antibodies can be used to construct bispecific antibodies with partner mAbs against HLA-Cw6, TNF-alpha, IL-17A, and/or other cell surface antigens to treat autoimmune diseases that express both IL-23R and the specific cell surface antigen.

[1006] As used herein, the term “in combination,” in the context of the administration of two or more distinct therapies to a subject, refers to the use of more than one therapy. The use of the term “in combination” does not restrict the order in which therapies are administered to a subject. For example, a first therapy (e.g., a composition described herein) can be administered prior to (e.g., 5 minutes, 15 minutes, 30 minutes, 45 minutes, 1 hour, 2 hours, 4 hours, 6 hours, 12 hours, 16 hours, 24 hours, 48 hours, 72 hours, 96 hours, 1 week, 2 weeks, 3 weeks, 4 weeks, 5 weeks, 6 weeks, 8 weeks, or 12 weeks before), concomitantly with, or subsequent to (e.g., 5 minutes, 15 minutes, 30 minutes, 45 minutes, 1 hour, 2 hours, 4 hours, 6 hours, 12 hours, 16 hours, 24 hours, 48 hours, 72 hours, 96 hours, 1 week, 2 weeks, 3 weeks, 4 weeks, 5 weeks, 6 weeks, 8 weeks, or 12 weeks after) the administration of a second therapy to a subject.

[1007] As used herein, in aspects the term “in combination,” in the context of the administration of two or more distinct antibodies particularly including two or more distinct IL-23R antibodies or a first IL-23R antibody and a second antibody which may bind IL-23R or which may not bind IL-23R, to a subject, refers to the use of more than one antibody together. The use of the term “in combination” does not restrict the order in which the antibodies are provided in a particular context or administered to a subject. For example, a first antibody (e.g., a composition comprising an IL-23R antibody described herein) can be administered prior to (e.g., 5 minutes, 15 minutes, 30 minutes, 45 minutes, 1 hour, 2 hours, 4 hours, 6 hours, 12 hours, 16 hours, 24 hours, 48 hours, 72 hours, 96 hours, 1 week, 2 weeks, 3 weeks, 4 weeks, 5 weeks, 6 weeks, 8 weeks, or 12 weeks before), concomitantly with, or subsequent to (e.g., 5 minutes, 15 minutes, 30 minutes, 45 minutes, 1 hour, 2 hours, 4 hours, 6 hours, 12 hours, 16 hours, 24 hours, 48 hours, 72 hours, 96 hours, 1 week, 2 weeks, 3 weeks, 4 weeks, 5 weeks, 6 weeks, 8 weeks, or 12 weeks after) the administration of a second antibody to a subject.

[1008] Methods of administration and dosing is described in more detail in below.

[1009] In another aspect, provided herein is the use of the antibody or antigen binding fragment thereof provided herein in the manufacture of a medicament for treating a disease or disorder in a subject.

[1010] In another aspect, provided herein is the use of a pharmaceutical composition provided herein in the manufacture of a medicament for treating a disease or disorder in a subject.

[1011] In another aspect, provided herein is the use of an antibody or antigen binding fragment thereof provided herein in the manufacture of a medicament, wherein the medicament is for use in a method for detecting the presence of an IL-23R in a biological sample, the method comprising contacting the biological sample with the antibody under conditions permissive for binding of the antibody to the IL-23R protein, and detecting whether a complex is formed between the antibody and the IL-23R protein.

[1012] In a specific embodiment, provided herein is a composition for use in the prevention and/or treatment of a disease or condition comprising an antibody or antigen binding fragment thereof provided herein. In one embodiment, provided herein is a composition for use in the prevention of a disease or condition, wherein the composition comprises an antibody or antigen binding fragment thereof provided herein. In one embodiment, provided herein is a composition for use in the treatment of a disease or condition, wherein the composition comprises an antibody or antigen binding fragment thereof provided herein. In some embodiments, the disease or condition is an IL-23R-mediated disease. In some embodiments, the disease or condition is an IL-23-mediated disease. In some embodiments, the disease or disorder is associated with IL-23R. In some embodiments, the disease or disorder is an autoimmune disease. In certain embodiments, the disease or disorder is multiple sclerosis, asthma, rheumatoid arthritis, inflammatory bowel disease (IBD), juvenile IBD, adolescent IBD, Crohn's disease, sarcoidosis, systemic elitematodes, ankylosing spondylitis, Autoimmune inflammation such as inflammation (axial spondylitic arthritis), psoriatic arthritis, or psoriasis and related diseases and disorders. In certain embodiments, the disease or disorder is psoriasis (eg, psoriasis vulgaris, guttate psoriasis), inverse psoriasis, pustular psoriasis, palmo-plantar, Psoriasis, psoriasis vulgaris, or psoriatic psoriasis, atopic dermatitis, acne ectopica, ulcerative colitis, Crohn's disease, Celiac's disease Sexual sprue, enteropathy with seronegative arthritis, microscopic colitis, collagen-accumulating colitis, eosinophilia gastroenteritis/esophagitis, colitis associated with radiation or chemotherapy, leukocyte adhesion deficiency-1 Psoriasis with congenital immunity disorders, chronic granulomatosis, glycogenosis type 1b, Hermannsky-Padrac syndrome, Chediac-East syndrome, Wiscot-Aldrich syndrome, rectal colon resection and ileal anastomosis, Later ileal psoriasis, gastrointestinal cancer, pancreatitis, insulin-dependent diabetes, mammary psoriasis, psoriasis, bile ductitis, primary biliary cirrhosis, virus-related enteropathy, periductitis, chronic bronchitis, chronic sinusitis, asthma, Psoriasis, or implant-to-host disease. In some embodiments, the disease or disorder is selected from subset of inflammatory diseases, which include, but are not limited to psoriasis (PSO), psoriatic arthritis (PSA), inflammatory bowel disease (IBD), Crohn's disease (CD), or ulcerative colitis (UC).

[1013] In certain embodiments, the subject is a subject in need thereof. In some embodiments, the subject has the disease or condition. In other embodiments, the subject is at risk of having the disease or condition. In some embodiments, the administration results in the prevention, management, treatment or amelioration of the disease or condition.

[1014] In one embodiment, provided herein is a composition for use in the prevention and/or treatment of a symptom of a disease or condition, wherein the composition comprises an antibody or antigen binding fragment thereof provided herein. In one embodiment, provided herein is a composition for use in the prevention of a symptom of a disease or condition, wherein the composition comprises an antibody or antigen binding fragment thereof provided herein. In one embodiment, provided herein is a composition for use in the treatment of a symptom of a disease or condition, wherein the composition comprises an antibody or antigen binding fragment thereof provided herein. In some embodiments, the disease or condition is an IL-23R-mediated and/or IL-23 mediated disease. In some embodiments, the disease or disorder is associated with IL-23R. In some embodiments, the disease or disorder is an autoimmune disease. In certain embodiments, the disease or disorder is multiple sclerosis, asthma, rheumatoid arthritis, inflammatory bowel disease (IBD), juvenile IBD, adolescent IBD, Crohn's disease, sarcoidosis, systemic elitematodes, ankylosing spondylitis, Autoimmune inflammation such as inflammation (axial spondylotic arthritis), psoriatic arthritis, or psoriasis and related diseases and disorders. In certain embodiments, the disease or disorder is psoriasis (eg, psoriasis vulgaris, guttate psoriasis), inverse psoriasis, pustular psoriasis, palmo-plantar, Psoriasis, psoriasis vulgaris, or psoriatic psoriasis, atopic dermatitis, acne ectopica, ulcerative colitis, Crohn's disease, Celiac's disease Sexual sprue, enteropathy with seronegative arthritis, microscopic colitis, collagen-accumulating colitis, eosinophilia gastroenteritis/esophagitis, colitis associated with radiation or chemotherapy, leukocyte adhesion deficiency-1 Psoriasis with congenital immunity disorders, chronic granulomatosis, glycogenosis type 1b, Hermannsky-Padrac syndrome, Chediac-East syndrome, Wiscot-Aldrich syndrome, rectal colon resection and ileal anastomosis, Later ileal psoriasis, gastrointestinal cancer, pancreatitis, insulin-dependent diabetes, mammary psoriasis, psoriasis, bile ductitis, primary biliary cirrhosis, virus-related enteropathy, periductitis, chronic bronchitis, chronic sinusitis, asthma, Psoriasis, or implant-to-host disease. In some embodiments, the disease or disorder is selected from subset of inflammatory diseases, which include, but are not limited to psoriasis (PSO), psoriatic arthritis (PSA), inflammatory bowel disease (IBD), Crohn's disease (CD), or ulcerative colitis (UC). In certain embodiments, the subject is a subject in need thereof. In some embodiments, the subject has the disease or condition. In other embodiments, the subject is at risk of having the disease or condition. In some embodiments, the administration results in the prevention or treatment of the symptom of the disease or condition.

[1015] In another embodiment, provided herein is a method of preventing and/or treating a disease or condition in a subject, comprising administering an effective amount of an antibody or antigen binding fragment thereof provided herein. In one embodiment, provided herein is a method of preventing a disease or condition in a subject, comprising administering an effective amount of an antibody or antigen binding fragment thereof provided herein. In one embodiment, provided herein is a method of treating a disease or condition in a subject, comprising administering an effective amount of an antibody or antigen binding fragment thereof provided herein. In some embodiments, the disease or condition is an IL-23R-mediated and/or IL-23 mediated disease. In some embodiments, the disease or disorder is associated with IL-23R. In some embodiments, the disease or disorder is an autoimmune disease. In certain embodiments, the disease or disorder is multiple sclerosis, asthma, rheumatoid arthritis, inflammatory bowel disease (IBD), juvenile IBD, adolescent IBD, Crohn's disease, sarcoidosis, systemic elitematodes, ankylosing spondylitis, Autoimmune inflammation such as inflammation (axial spondylotic arthritis), psoriatic arthritis, or psoriasis and related diseases and disorders. In certain embodiments, the disease or disorder is psoriasis (eg, psoriasis vulgaris, guttate psoriasis), inverse psoriasis, pustular psoriasis, palmo-plantar, Psoriasis, psoriasis vulgaris, or psoriatic psoriasis, atopic dermatitis, acne ectopica, ulcerative colitis, Crohn's disease, Celiac's disease Sexual sprue, enteropathy with seronegative arthritis, microscopic colitis, collagen-accumulating colitis, eosinophilia gastroenteritis/esophagitis, colitis associated with radiation or chemotherapy, leukocyte adhesion deficiency-1 Psoriasis with congenital immunity disorders, chronic granulomatosis, glycogenosis type 1b, Hermannsky-Padrac syndrome, Chediac-East syndrome, Wiscot-Aldrich syndrome, rectal colon resection and ileal anastomosis, Later ileal psoriasis, gastrointestinal cancer, pancreatitis, insulin-dependent diabetes, mammary psoriasis, psoriasis, bile ductitis, primary biliary cirrhosis, virus-related enteropathy, periductitis, chronic bronchitis, chronic sinusitis, asthma, Psoriasis, or implant-to-host disease. In some embodiments, the disease or disorder is selected from subset of inflammatory diseases, which include, but are not limited to psoriasis (PSO), psoriatic arthritis (PSA), inflammatory bowel disease (IBD), Crohn's disease (CD), or ulcerative colitis (UC). In certain embodiments, the subject is a subject in need thereof. In some embodiments, the subject has the disease or condition. In other embodiments, the subject is at risk of having the disease or condition. In some embodiments, the administration results in the prevention or treatment of the disease or condition.

[1016] In another embodiment, provided herein is a method of preventing and/or treating a symptom of a disease or condition in a subject, comprising administering an effective amount of an antibody or antigen binding fragment thereof provided herein. In one embodiment, provided herein is a method of preventing a symptom of a disease or condition in a subject, comprising administering an effective amount of an antibody or antigen binding fragment thereof provided herein. In one embodiment, provided herein is a method of treating a symptom of a disease or condition in a subject, comprising administering an effective amount of an antibody or antigen binding fragment thereof provided herein. In some embodiments, the disease or condition is an IL-23R-mediated and/or IL-23 mediated disease. In some embodiments, the disease or disorder is associated with IL-23R. In some embodiments, the disease or disorder is an autoimmune disease. In certain embodiments, the disease or disorder is multiple sclerosis, asthma, rheumatoid arthritis, inflammatory bowel disease (IBD), juvenile IBD, adolescent IBD, Crohn's disease, sarcoidosis, systemic elitematodes, ankylosing spondylitis, Autoimmune inflammation such as inflammation (axial spondylotic arthritis), psoriatic arthritis, or psoriasis and related diseases and disorders. In certain embodiments, the disease or disorder is psoriasis (eg, psoriasis vulgaris, guttate psoriasis), inverse psoriasis, pustular psoriasis, palmo-plantar, Psoriasis, psoriasis vulgaris, or psoriatic psoriasis, atopic dermatitis, acne ectopica, ulcerative colitis, Crohn's disease, Celiac's disease Sexual sprue, enteropathy with seronegative arthritis, microscopic colitis, collagen-accumulating colitis, eosinophilia gastroenteritis/esophagitis, colitis associated with radiation or chemotherapy, leukocyte adhesion deficiency-1 Psoriasis with congenital immunity disorders, chronic granulomatosis, glycogenosis type 1b, Hermannsky-Padrac syndrome, Chediac-East syndrome, Wiscot-Aldrich syndrome, rectal colon resection and ileal anastomosis, Later ileal psoriasis, gastrointestinal cancer, pancreatitis, insulin-dependent diabetes, mammary psoriasis, psoriasis, bile ductitis, primary biliary cirrhosis, virus-related enteropathy, periductitis, chronic bronchitis, chronic sinusitis, asthma, Psoriasis, or implant-to-host disease. In some embodiments, the disease or disorder is selected from subset of inflammatory diseases, which include, but are not limited to psoriasis (PSO), psoriatic arthritis (PSA), inflammatory bowel disease (IBD), Crohn's disease (CD), or ulcerative colitis (UC). In certain embodiments, the subject is a subject in need thereof. In some embodiments, the subject has the disease or condition. In other embodiments, the subject is at risk of having the disease or condition. In some embodiments, the administration results in the prevention or treatment of the symptom of the disease or condition.

[1017] Also provided herein are methods of preventing and/or treating a disease or condition by administrating to a subject of an effective amount of an antibody or antigen binding fragment thereof provided herein, or pharmaceutical composition comprising an antibody or antigen binding fragment thereof provided herein. In one aspect, the antibody or antigen binding fragment thereof is substantially purified (i.e., substantially free from substances that limit its effect or produce undesired side-effects). The subject administered a therapy can be a mammal such as non-primate (e.g., cows, pigs, horses, cats, dogs, rats etc.) or a primate (e.g., a monkey, such as a cynomolgus macaque monkey, or a human). In a one embodiment, the subject is a human. In another embodiment, the subject is a human with a disease or condition.

[1018] Various delivery systems are known and can be used to administer a prophylactic or therapeutic agent (e.g., an antibody or antigen binding fragment thereof provided herein), including, but not limited to, encapsulation in liposomes, microparticles, microcapsules, recombinant cells capable of expressing the antibody or antigen binding fragment thereof, receptor-mediated endocytosis (see, e.g., Wu and Wu, J. Biol. Chem. 262:4429-4432 (1987)), construction of a nucleic acid as part of a retroviral or other vector, etc. Methods of administering a prophylactic or therapeutic agent (e.g., an antibody or antigen binding fragment thereof provided herein), or pharmaceutical composition include, but are not limited to, parenteral administration (e.g., intradermal, intramuscular, intraperitoneal, intravenous and subcutaneous), epidural, and mucosal (e.g., intranasal and oral routes). In a specific embodiment, a prophylactic or therapeutic agent (e.g., an antibody or antigen binding fragment thereof provided herein), or a pharmaceutical composition is administered intranasally, intramuscularly, intravenously, or subcutaneously. The prophylactic or therapeutic agents, or compositions may be administered by any convenient route, for example by infusion or bolus injection, by absorption through epithelial or mucocutaneous linings (e.g., oral mucosa, intranasal mucosa, rectal and intestinal mucosa, etc.) and may be administered together with other biologically active agents. Administration can be systemic or local. In addition, pulmonary administration can also be employed, e.g., by use of an inhaler or nebulizer, and formulation with an aerosolizing agent. See, e.g., U.S. Pat. Nos. 6,019,968, 5,985,320, 5,985,309, 5,934,272, 5,874,064, 5,855,913, 5,290,540, and 4,880,078; and PCT Publication Nos. WO 92/19244, WO 97/32572, WO 97/44013, WO 98/31346, and WO 99/66903, each of which is incorporated herein by reference their entirety.

[1019] In some embodiment, nanoparticles that contain anti-IL-23R antibodies are used to deliver therapeutic agents to IL-23R expressing cells. In some embodiment, the therapeutic agents antagonize a different target other than IL-23R (e.g. siRNA against TNFa, etc).

[1020] In a specific embodiment, it may be desirable to administer a prophylactic or therapeutic agent, or a pharmaceutical composition provided herein locally to the area in need of treatment. This may be achieved by, for example, and not by way of limitation, local infusion, by topical administration (e.g., by intranasal spray), by injection, or by means of an implant, said implant being of a porous, non-porous, or gelatinous material, including membranes, such as sialastic membranes, or fibers. In some embodiments, when administering an antibody or antigen binding fragment thereof provided herein, care must be taken to use materials to which the antibody or antigen binding fragment thereof does not absorb.

[1021] In another embodiment, a prophylactic or therapeutic agent, or a composition provided herein can be delivered in a vesicle, in particular a liposome (see Langer, 1990, Science 249:1527-1533; Treat et al., in Liposomes in the Therapy of Infectious Disease and Cancer, Lopez-Berestein and Fidler (eds.), Liss, New York, pp. 353-365 (1989); Lopez-Berestein, ibid., pp. 317-327; see generally ibid.).

[1022] In another embodiment, a prophylactic or therapeutic agent, or a composition provided herein can be delivered in a controlled release or sustained release system. In one embodiment, a pump may be used to achieve controlled or sustained release (see Langer, supra; Sefton, 1987, CRC Crit. Ref. Biomed. Eng. 14:20; Buchwald et al., 1980, Surgery 88:507; Saudek et al., 1989, N. Engl. J. Med. 321:574). In another embodiment, polymeric materials can be used to achieve controlled or sustained release of a prophylactic or therapeutic agent (e.g., an antibody provided herein) or a composition provided herein (see e.g., Medical Applications of Controlled Release, Langer and Wise (eds.), CRC Pres., Boca Raton, Florida (1974); Controlled Drug Bioavailability, Drug Product Design and Performance, Smolen and Ball (eds.), Wiley, New York (1984); Ranger and Peppas, 1983, J., Macromol. Sci. Rev. Macromol. Chem. 23:61; see also Levy et al., 1985, Science 228:190; During et al., 1989, Ann. Neurol. 25:351; Howard et al., 1989, J. Neurosurg. 7 1:105); U.S. Pat. Nos. 5,679,377; 5,916,597; 5,912,015; 5,989,463; 5,128,326; PCT Publication No. WO 99/15154; and PCT Publication No. WO 99/20253. Examples of polymers used in sustained release formulations include, but are not limited to, poly(2-hydroxy ethyl methacrylate), poly(methyl methacrylate), poly(acrylic acid), poly(ethylene-co-vinyl acetate), poly(methacrylic acid), polyglycolides (PLG), polyanhydrides, poly(N-vinyl pyrrolidone), poly(vinyl alcohol), polyacrylamide, poly(ethylene glycol), polylactides (PLA), poly(lactide-co-glycolides) (PLGA), and polyorthoesters. In an embodiment, the polymer used in a sustained release formulation is inert, free of leachable impurities, stable on storage, sterile, and biodegradable. In yet another embodiment, a controlled or sustained release system can be placed in proximity of the therapeutic target, i.e., the nasal passages or lungs, thus requiring only a fraction of the systemic dose (see, e.g., Goodson, in Medical Applications of Controlled Release, supra, vol. 2, pp. 115-138 (1984)). Controlled release systems are discussed in the review by Langer (1990, Science 249:1527-1533). Any technique known to one of skill in the art can be used to produce sustained release formulations comprising one or more antibody or antigen binding fragment thereof provided herein. See, e.g., U.S. Pat. No. 4,526,938, PCT publication WO 91/05548, PCT publication WO 96/20698, Ning et al., 1996, “Intratumoral Radioimmunotherapy of a Human Colon Cancer Xenograft Using a Sustained-Release Gel,” Radiotherapy & Oncology 39:179-189, Song et al., 1995, “Antibody Mediated Lung Targeting of Long-Circulating Emulsions,” PDA Journal of Pharmaceutical Science & Technology 50:372-397, Cleek et al., 1997, “Biodegradable Polymeric Carriers for a bFGF Antibody for Cardiovascular Application,” Pro. Int'l. Symp. Control. Rel. Bioact. Mater. 24:853-854, and Lam et al., 1997, “Microencapsulation of Recombinant Humanized Monoclonal Antibody for Local Delivery,” Proc. Int'l. Symp. Control Rel. Bioact. Mater. 24:759-760, each of which is incorporated herein by reference in their entirety.

[1023] In a specific embodiment, where the composition provided herein is a nucleic acid encoding a prophylactic or therapeutic agent (e.g., an antibody or antigen binding fragment thereof provided herein), the nucleic acid can be administered in vivo to promote expression of its encoded prophylactic or therapeutic agent, by constructing it as part of an appropriate nucleic acid expression vector and administering it so that it becomes intracellular, e.g., by use of a retroviral vector (see U.S. Pat. No. 4,980,286), or by direct injection, or by use of microparticle bombardment (e.g., a gene gun; Biolistic, Dupont), or coating with lipids or cell surface receptors or transfecting agents, or by administering it in linkage to a homeobox-like peptide which is known to enter the nucleus (see, e.g., Joliot et al., 1991, Proc. Natl. Acad. Sci. USA 88:1864-1868), etc. Alternatively, a nucleic acid can be introduced intracellularly and incorporated within host cell DNA for expression by homologous recombination.

[1024] In a specific embodiment, a composition provided herein comprises one, two or more antibodies or antigen binding fragments thereof provided herein. In another embodiment, a composition provided herein comprises one, two or more antibodies or antigen binding fragments thereof provided herein and a prophylactic or therapeutic agent other than an antibody or antigen binding fragment thereof provided herein. In one embodiment, the agents are known to be useful for or have been or are currently used for the prevention, management, treatment and/or amelioration of a disease or condition. In addition to prophylactic or therapeutic agents, the compositions provided herein may also comprise an excipient.

[1025] The compositions provided herein include bulk drug compositions useful in the manufacture of pharmaceutical compositions (e.g., compositions that are suitable for administration to a subject or patient) that can be used in the preparation of unit dosage forms. In an embodiment, a composition provided herein is a pharmaceutical composition. Such compositions comprise a prophylactically or therapeutically effective amount of one or more prophylactic or therapeutic agents (e.g., an antibody or antigen binding fragment thereof provided herein or other prophylactic or therapeutic agent), and a pharmaceutically acceptable excipient. The pharmaceutical compositions can be formulated to be suitable for the route of administration to a subject.

[1026] In a specific embodiment, the term “excipient” can also refer to a diluent, adjuvant (e.g., Freunds' adjuvant (complete or incomplete) or vehicle. Pharmaceutical excipients can be sterile liquids, such as water and oils, including those of petroleum, animal, vegetable or synthetic origin, such as peanut oil, soybean oil, mineral oil, sesame oil and the like. Water is an exemplary excipient when the pharmaceutical composition is administered intravenously. Saline solutions and aqueous dextrose and glycerol solutions can also be employed as liquid excipients, particularly for injectable solutions. Suitable pharmaceutical excipients include starch, glucose, lactose, sucrose, gelatin, malt, rice, flour, chalk, silica gel, sodium stearate, glycerol monostearate, talc, sodium chloride, dried skim milk, glycerol, propylene, glycol, water, ethanol and the like. The composition, if desired, can also contain minor amounts of wetting or emulsifying agents, or pH buffering agents. These compositions can take the form of solutions, suspensions, emulsion, tablets, pills, capsules, powders, sustained-release formulations and the like. Oral formulation can include standard excipients such as pharmaceutical grades of mannitol, lactose, starch, magnesium stearate, sodium saccharine, cellulose, magnesium carbonate, etc. Examples of suitable pharmaceutical excipients are described in Remington's Pharmaceutical Sciences (1990) Mack Publishing Co., Easton, PA. Such compositions will contain a prophylactically or therapeutically effective amount of the antibody or antigen binding fragment thereof provided herein, such as in purified form, together with a suitable amount of excipient so as to provide the form for proper administration to the patient. The formulation should suit the mode of administration.

[1027] In an embodiment, the composition is formulated in accordance with routine procedures as a pharmaceutical composition adapted for intravenous administration to human beings. Typically, compositions for intravenous administration are solutions in sterile isotonic aqueous buffer. Where necessary, the composition may also include a solubilizing agent and a local anesthetic such as lignocamne to ease pain at the site of the injection. Such compositions, however, may be administered by a route other than intravenous.

[1028] Generally, the ingredients of compositions provided herein are supplied either separately or mixed together in unit dosage form, for example, as a dry lyophilized powder or water free concentrate in a hermetically sealed container such as an ampoule or sachette indicating the quantity of active agent. Where the composition is to be administered by infusion, it can be dispensed with an infusion bottle containing sterile pharmaceutical grade water or saline. Where the composition is administered by injection, an ampoule of sterile water for injection or saline can be provided so that the ingredients may be mixed prior to administration.

[1029] An antibody or antigen binding fragment thereof provided herein can be packaged in a hermetically sealed container such as an ampoule or sachette indicating the quantity of antibody. In one embodiment, the antibody or antigen binding fragment thereof is supplied as a dry sterilized lyophilized powder or water free concentrate in a hermetically sealed container and can be reconstituted, e.g., with water or saline to the appropriate concentration for administration to a subject. The lyophilized antibody or antigen binding fragment thereof can be stored at between 2 and 8° C. in its original container and the antibody or antigen binding fragment thereof can be administered within 12 hours, such as within 6 hours, within 5 hours, within 3 hours, or within 1 hour after being reconstituted. In an alternative embodiment, an antibody or antigen binding fragment thereof provided herein is supplied in liquid form in a hermetically sealed container indicating the quantity and concentration of the antibody.

[1030] The compositions provided herein can be formulated as neutral or salt forms. Pharmaceutically acceptable salts include those formed with anions such as those derived from hydrochloric, phosphoric, acetic, oxalic, tartaric acids, etc., and those formed with cations such as those derived from sodium, potassium, ammonium, calcium, ferric hydroxides, isopropylamine, triethylamine, 2-ethylamino ethanol, histidine, procaine, etc.

[1031] The amount of a prophylactic or therapeutic agent (e.g., an antibody or antigen binding fragment thereof provided herein), or a composition provided herein that will be effective in the prevention and/or treatment of a disease or condition can be determined by standard clinical techniques. In addition, in vitro assays may optionally be employed to help identify optimal dosage ranges. The precise dose to be employed in the formulation will also depend on the route of administration, and the seriousness of a disease or condition, and should be decided according to the judgment of the practitioner and each patient's circumstances.

[1032] Effective doses may be extrapolated from dose-response curves derived from in vitro or animal model test systems.

[1033] In certain embodiments, the route of administration for a dose of an antibody or antigen binding fragment thereof provided herein to a patient is intranasal, intramuscular, intravenous, subcutaneous, or a combination thereof, but other routes described herein are also acceptable. Each dose may or may not be administered by an identical route of administration. In some embodiments, an antibody or antigen binding fragment thereof provided herein may be administered via multiple routes of administration simultaneously or subsequently to other doses of the same or a different antibody or antigen binding fragment thereof provided herein.

[1034] In certain embodiments, the antibody or antigen binding fragment thereof provided herein are administered prophylactically or therapeutically to a subject. The antibody or antigen binding fragment thereof provided herein can be prophylactically or therapeutically administered to a subject so as to prevent, lessen or ameliorate a disease or symptom thereof.

### Pharmaceutical Compositions

[1035] In one aspect, the present disclosure further provides pharmaceutical compositions comprising at least one antibody or antigen binding fragment thereof of the present disclosure. In some embodiments, a pharmaceutical composition comprises therapeutically effective amount of an antibody or antigen binding fragment thereof provided herein and a pharmaceutically acceptable excipient.

[1036] Pharmaceutical compositions comprising an antibody or antigen binding fragment thereof are prepared for storage by mixing the fusion protein having the desired degree of purity with optional physiologically acceptable excipients (see, e.g., Remington, Remington's Pharmaceutical Sciences (18th ed. 1980)) in the form of aqueous solutions or lyophilized or other dried forms.

[1037] The antibody or antigen binding fragment thereof of the present disclosure may be formulated in any suitable form for delivery to a target cell/tissue, e.g., as microcapsules or macroemulsions (Remington, supra; Park et al., 2005, Molecules 10:146-61; Malik et al., 2007, Curr. Drug. Deliv. 4:141-51), as sustained release formulations (Putney and Burke, 1998, Nature Biotechnol. 16:153-57), or in liposomes (Maclean et al., 1997, Int. J. Oncol. 11:325-32; Kontermann, 2006, Curr. Opin. Mol. Ther. 8:39-45).

[1038] An antibody or antigen binding fragment thereof provided herein can also be entrapped in microcapsule prepared, for example, by coacervation techniques or by interfacial polymerization, for example, hydroxymethylcellulose or gelatin-microcapsule and poly-(methylmethacylate) microcapsule, respectively, in colloidal drug delivery systems (for example, liposomes, albumin microspheres, microemulsions, nano-particles, and nanocapsules) or in macroemulsions. Such techniques are disclosed, for example, in Remington, supra.

[1039] Various compositions and delivery systems are known and can be used with an antibody or antigen binding fragment thereof as described herein, including, but not limited to, encapsulation in liposomes, microparticles, microcapsules, recombinant cells capable of expressing the antibody or antigen binding fragment thereof, receptor-mediated endocytosis (see, e.g., Wu and Wu, 1987, J. Biol. Chem. 262:4429-32), construction of a nucleic acid as part of a retroviral or other vector, etc. In another embodiment, a composition can be provided as a controlled release or sustained release system. In one embodiment, a pump may be used to achieve controlled or sustained release (see, e.g., Langer, supra; Sefton, 1987, Crit. Ref. Biomed. Eng. 14:201-40; Buchwald et al., 1980, Surgery 88:507-16; and Saudek et al., 1989, N. Engl. J. Med. 321:569-74). In another embodiment, polymeric materials can be used to achieve controlled or sustained release of a prophylactic or therapeutic agent (e.g., an antibody or antigen binding fragment thereof as described herein) or a composition provided herein (see, e.g., Medical Applications of Controlled Release (Langer and Wise eds., 1974); Controlled Drug Bioavailability, Drug Product Design and Performance (Smolen and Ball eds., 1984); Ranger and Peppas, 1983, J. Macromol. Sci. Rev. Macromol. Chem. 23:61-126; Levy et al., 1985, Science 228:190-92; During et al., 1989, Ann. Neurol. 25:351-56; Howard et al., 1989, J. Neurosurg. 71:105-12; U.S. Pat. Nos. 5,679,377; 5,916,597; 5,912,015; 5,989,463; and 5,128,326; PCT Publication Nos. WO 99/15154 and WO 99/20253). Examples of polymers used in sustained release formulations include, but are not limited to, poly(2-hydroxy ethyl methacrylate), poly(methyl methacrylate), poly(acrylic acid), poly(ethylene-co-vinyl acetate), poly(methacrylic acid), polyglycolides (PLG), polyanhydrides, poly(N-vinyl pyrrolidone), poly(vinyl alcohol), polyacrylamide, poly(ethylene glycol), polylactides (PLA), poly(lactide-co-glycolides) (PLGA), and polyorthoesters. In one embodiment, the polymer used in a sustained release formulation is inert, free of leachable impurities, stable on storage, sterile, and biodegradable.

[1040] In yet another embodiment, a controlled or sustained release system can be placed in proximity of a particular target tissue, for example, the nasal passages or lungs, thus requiring only a fraction of the systemic dose (see, e.g., Goodson, Medical Applications of Controlled Release Vol. 2, 115-38 (1984)). Controlled release systems are discussed, for example, by Langer, 1990, Science 249:1527-33. Any technique known to one of skill in the art can be used to produce sustained release formulations comprising one or more antibody or antigen binding fragment thereof as described herein (see, e.g., U.S. Pat. No. 4,526,938, PCT publication Nos. WO 91/05548 and WO 96/20698, Ning et al., 1996, Radiotherapy & Oncology 39:179-89; Song et al., 1995, PDA J. of Pharma. Sci. & Tech. 50:372-97; Cleek et al., 1997, Pro. Int'l. Symp. Control. Rel. Bioact. Mater. 24:853-54; and Lam et al., 1997, Proc. Int'l. Symp. Control Rel. Bioact. Mater. 24:759-60).

### Gene Therapy

[1041] In a specific embodiment, nucleic acids comprising sequences encoding antibodies or functional derivatives thereof, are administered to a subject for use in a method provided herein, for example, to prevent, manage, treat and/or ameliorate an IL-23R-mediated disease, disorder or condition, by way of gene therapy. Such therapy encompasses that performed by the administration to a subject of an expressed or expressible nucleic acid. In an embodiment, the nucleic acids produce their encoded antibody, and the antibody mediates a prophylactic or therapeutic effect.

[1042] Any of the methods for recombinant gene expression (or gene therapy) available in the art can be used.

[1043] For general review of the methods of gene therapy, see Goldspiel et al., 1993, Clinical Pharmacy 12:488-505; Wu and Wu, 1991, Biotherapy 3:87-95; Tolstoshev, 1993, Ann. Rev. Pharmacol. Toxicol. 32:573-596; Mulligan, 1993, Science 260:926-932; and Morgan and Anderson, 1993, Ann. Rev. Biochem. 62:191-217; May, 1993, TIBTECH 11(5):155-215. Methods commonly known in the art of recombinant DNA technology which can be used are described in Ausubel et al. (eds.), Current Protocols in Molecular Biology, John Wiley & Sons, NY (1993); and Kriegler, Gene Transfer and Expression, A Laboratory Manual, Stockton Press, NY (1990).

[1044] In a specific embodiment, a composition comprises nucleic acids encoding an antibody provided herein, the nucleic acids being part of an expression vector that expresses the antibody or chimeric proteins or heavy or light chains thereof in a suitable host. In particular, such nucleic acids have promoters, such as heterologous promoters, operably linked to the antibody coding region, the promoter being inducible or constitutive, and, optionally, tissue-specific. In another particular embodiment, nucleic acid molecules are used in which the antibody coding sequences and any other desired sequences are flanked by regions that promote homologous recombination at a desired site in the genome, thus providing for intrachromosomal expression of the antibody encoding nucleic acids (Koller and Smithies, 1989, Proc. Natl. Acad. Sci. USA 86:8932-8935; Zijlstra et al., 1989, Nature 342:435-438).

[1045] Delivery of the nucleic acids into a subject can be either direct, in which case the subject is directly exposed to the nucleic acid or nucleic acid-carrying vectors, or indirect, in which case, cells are first transformed with the nucleic acids in vitro, then transplanted into the subject. These two approaches are known, respectively, as in vivo or ex vivo gene therapy.

[1046] In a specific embodiment, the nucleic acid sequences are directly administered in vivo, where the sequences are expressed to produce the encoded product. This can be accomplished by any of numerous methods known in the art, e.g., by constructing them as part of an appropriate nucleic acid expression vector and administering the vector so that the sequences become intracellular, e.g., by infection using defective or attenuated retroviral or other viral vectors (see U.S. Pat. No. 4,980,286), or by direct injection of naked DNA, or by use of microparticle bombardment (e.g., a gene gun; Biolistic, Dupont), or coating with lipids or cell surface receptors or transfecting agents, encapsulation in liposomes, microparticles, or microcapsules, or by administering them in linkage to a peptide which is known to enter the nucleus, by administering it in linkage to a ligand subject to receptor-mediated endocytosis (see, e.g., Wu and Wu, 1987, J. Biol. Chem. 262:4429-4432) (which can be used to target cell types specifically expressing the receptors), etc. In another embodiment, nucleic acid-ligand complexes can be formed in which the ligand comprises a fusogenic viral peptide to disrupt endosomes, allowing the nucleic acid to avoid lysosomal degradation. In yet another embodiment, the nucleic acid can be targeted in vivo for cell specific uptake and expression, by targeting a specific receptor (see, e.g., PCT Publications WO 92/06180; WO 92/22635; WO 92/20316; WO93/14188, WO 93/20221). Alternatively, the nucleic acid can be introduced intracellularly and incorporated within host cell DNA for expression, by homologous recombination (Koller and Smithies, 1989, Proc. Natl. Acad. Sci. USA 86:8932-8935; and Zijlstra et al., 1989, Nature 342:435-438).

[1047] In a specific embodiment, viral vectors that contains nucleic acid sequences encoding an antibody are used. For example, a retroviral vector can be used (see Miller et al., 1993, Meth. Enzymol. 217:581-599). These retroviral vectors contain the components necessary for the correct packaging of the viral genome and integration into the host cell DNA. The nucleic acid sequences encoding the antibody to be used in gene therapy can be cloned into one or more vectors, which facilitates delivery of the gene into a subject. More detail about retroviral vectors can be found in Boesen et al., 1994, Biotherapy 6:291-302, which describes the use of a retroviral vector to deliver the MDR1 gene to hematopoietic stem cells in order to make the stem cells more resistant to chemotherapy. Other references illustrating the use of retroviral vectors in gene therapy are: Clowes et al., 1994, J. Clin. Invest. 93:644-651; Klein et al., 1994, Blood 83:1467-1473; Salmons and Gunzberg, 1993, Human Gene Therapy 4:129-141; and Grossman and Wilson, 1993, Curr. Opin. in Genetics and Devel. 3:110-114.

[1048] Adenoviruses are other viral vectors that can be used in the recombinant production of antibodies. Adenoviruses are especially attractive vehicles for delivering genes to respiratory epithelia. Adenoviruses naturally infect respiratory epithelia where they cause a mild disease. Other targets for adenovirus-based delivery systems are liver, the central nervous system, endothelial cells, and muscle. Adenoviruses have the advantage of being capable of infecting non-dividing cells. Kozarsky and Wilson, 1993, Current Opinion in Genetics and Development 3:499-503 present a review of adenovirus-based gene therapy. Bout et al., 1994, Human Gene Therapy 5:3-10 demonstrated the use of adenovirus vectors to transfer genes to the respiratory epithelia of rhesus monkeys. Other instances of the use of adenoviruses in gene therapy can be found in Rosenfeld et al., 1991, Science 252:431-434; Rosenfeld et al., 1992, Cell 68:143-155; Mastrangeli et al., 1993, J. Clin. Invest. 91:225-234; PCT Publication WO94/12649; and Wang et al., 1995, Gene Therapy 2:775-783. In a specific embodiment, adenovirus vectors are used.

[1049] Adeno-associated virus (AAV) can also be utilized (Walsh et al., 1993, Proc. Soc. Exp. Biol. Med. 204:289-300; and U.S. Pat. No. 5,436,146). In a specific embodiment, AAV vectors are used to express an anti-IL-23R antibody as provided herein. In certain embodiments, the AAV comprises a nucleic acid encoding a VH domain. In other embodiments, the AAV comprises a nucleic acid encoding a VL domain. In certain embodiments, the AAV comprises a nucleic acid encoding a VH domain and a VL domain. In some embodiments of the methods provided herein, a subject is administered an AAV comprising a nucleic acid encoding a VH domain and an AAV comprising a nucleic acid encoding a VL domain. In other embodiments, a subject is administered an AAV comprising a nucleic acid encoding a VH domain and a VL domain. In certain embodiments, the VH and VL domains are over-expressed.

[1050] Another approach to gene therapy involves transferring a gene to cells in tissue culture by such methods as electroporation, lipofection, calcium phosphate mediated transfection, or viral infection. Usually, the method of transfer includes the transfer of a selectable marker to the cells. The cells are then placed under selection to isolate those cells that have taken up and are expressing the transferred gene. Those cells are then delivered to a subject.

[1051] In this embodiment, the nucleic acid is introduced into a cell prior to administration in vivo of the resulting recombinant cell. Such introduction can be carried out by any method known in the art, including but not limited to transfection, electroporation, microinjection, infection with a viral or bacteriophage vector containing the nucleic acid sequences, cell fusion, chromosome-mediated gene transfer, microcellmediated gene transfer, spheroplast fusion, etc. Numerous techniques are known in the art for the introduction of foreign genes into cells (see, e.g., Loeffler and Behr, 1993, Meth. Enzymol. 217:599-618; Cohen et al., 1993, Meth. Enzymol. 217:618-644; Clin. Pharma. Ther. 29:69-92 (1985)) and can be used in accordance with the methods provided herein, provided that the necessary developmental and physiological functions of the recipient cells are not disrupted. The technique should provide for the stable transfer of the nucleic acid to the cell, so that the nucleic acid is expressible by the cell, such as heritable and expressible by its cell progeny.

[1052] The resulting recombinant cells can be delivered to a subject by various methods known in the art. Recombinant blood cells (e.g., hematopoietic stem or progenitor cells) can be administered intravenously. The amount of cells envisioned for use depends on the desired effect, patient state, etc., and can be determined by one skilled in the art.

[1053] Cells into which a nucleic acid can be introduced for purposes of gene therapy encompass any desired, available cell type, and include but are not limited to epithelial cells, endothelial cells, keratinocytes, fibroblasts, muscle cells, hepatocytes; blood cells such as T lymphocytes, B lymphocytes, monocytes, macrophages, neutrophils, eosinophils, megakaryocytes, granulocytes; various stem or progenitor cells, in particular hematopoietic stem or progenitor cells, e.g., as obtained from bone marrow, umbilical cord blood, peripheral blood, fetal liver, etc.

[1054] In a specific embodiment, the cell used for gene therapy is autologous to the subject.

[1055] In an embodiment in which recombinant cells are used in gene therapy, nucleic acid sequences encoding an antibody are introduced into the cells such that they are expressible by the cells or their progeny, and the recombinant cells are then administered in vivo for therapeutic effect. In a specific embodiment, stem or progenitor cells are used. Any stem and/or progenitor cells which can be isolated and maintained in vitro can potentially be used in accordance with this embodiment of the methods provided herein (see e.g., PCT Publication WO 94/08598; Stemple and Anderson, 1992, Cell 7 1:973-985; Rheinwald, 1980, Meth. Cell Bio. 21A:229; and Pittelkow and Scott, 1986, Mayo Clinic Proc. 61:771).

[1056] In a specific embodiment, the nucleic acid to be introduced for purposes of gene therapy comprises an inducible promoter operably linked to the coding region, such that expression of the nucleic acid is controllable by controlling the presence or absence of the appropriate inducer of transcription.

### Kits

[1057] Also provided herein are kits comprising an antibody (e.g., an anti-IL-23R antibody) provided herein, or a composition (e.g., a pharmaceutical composition) thereof, packaged into suitable packaging material. A kit optionally includes a label or packaging insert including a description of the components or instructions for use in vitro, in vivo, or ex vivo, of the components therein.

[1058] The term “packaging material” refers to a physical structure housing the components of the kit. The packaging material can maintain the components sterilely, and can be made of material commonly used for such purposes (e.g., paper, corrugated fiber, glass, plastic, foil, ampoules, vials, tubes, etc.).

[1059] Kits provided herein can include labels or inserts. Labels or inserts include “printed matter,” e.g., paper or cardboard, separate or affixed to a component, a kit or packing material (e.g., a box), or attached to, for example, an ampoule, tube, or vial containing a kit component. Labels or inserts can additionally include a computer readable medium, such as a disk (e.g., hard disk, card, memory disk), optical disk such as CD- or DVD-ROM/RAM, DVD, MP3, magnetic tape, or an electrical storage media such as RAM and ROM or hybrids of these such as magnetic/optical storage media, FLASH media, or memory type cards. Labels or inserts can include information identifying manufacturer information, lot numbers, manufacturer location, and date.

[1060] Kits provided herein can additionally include other components. Each component of the kit can be enclosed within an individual container, and all of the various containers can be within a single package. Kits can also be designed for cold storage. A kit can further be designed to contain antibodies provided herein, or cells that contain nucleic acids encoding the antibodies provided herein. The cells in the kit can be maintained under appropriate storage conditions until ready to use.

[1061] Also provided herein are panels of antibodies that immunospecifically bind to an IL-23R antigen. In specific embodiments, provided herein are panels of antibodies having different association rate constants, different dissociation rate constants, different affinities for IL-23R antigen, and/or different specificities for an IL-23R antigen. In certain embodiments, provided herein are panels of about 10, preferably about 25, about 50, about 75, about 100, about 125, about 150, about 175, about 200, about 250, about 300, about 350, about 400, about 450, about 500, about 550, about 600, about 650, about 700, about 750, about 800, about 850, about 900, about 950, or about 1000 antibodies or more. Panels of antibodies can be used, for example, in 96 well or 384 well plates, such as for assays such as ELISAs.

[1062] Unless otherwise defined, all technical and scientific terms used herein have the same meaning as commonly understood by one of ordinary skill in the art to which this invention belongs. Although methods and materials similar or equivalent to those described herein can be used in the practice or testing of the invention, suitable methods and materials are described herein.

[1063] As used herein, numerical values are often presented in a range format throughout this document. The use of a range format is merely for convenience and brevity and should not be construed as an inflexible limitation on the scope of the invention unless the context clearly indicates otherwise. Accordingly, the use of a range expressly includes all possible subranges, all individual numerical values within that range, and all numerical values or numerical ranges including integers within such ranges and fractions of the values or the integers within ranges unless the context clearly indicates otherwise. This construction applies regardless of the breadth of the range and in all contexts throughout this patent document. Thus, for example, reference to a range of 90-100% includes 91-99%, 92-98%, 93-95%, 91-98%, 91-97%, 91-96%, 91-95%, 91-94%, 91-93%, and so forth. Reference to a range of 90-100% also includes 91%, 92%, 93%, 94%, 95%, 95%, 97%, etc., as well as 91.1%, 91.2%, 91.3%, 91.4%, 91.5%, etc., 92.1%, 92.2%, 92.3%, 92.4%, 92.5%, etc., and so forth.

[1064] In addition, reference to a range of 1-3, 3-5, 5-10, 10-20, 20-30, 30-40, 40-50, 50-60, 60-70, 70-80, 80-90, 90-100, 100-110, 110-120, 120-130, 130-140, 140-150, 150-160, 160-170, 170-180, 180-190, 190-200, 200-225, 225-250 includes 1, 2, 3, 4, 5, 6, 7, 8, 9, 10, 11, 12, 13, 14, 15, 16, 17, 18, 19, 20, etc. In a further example, reference to a range of 25-250, 250-500, 500-1,000, 1,000-2,500, 2,500-5,000, 5,000-25,000, 25,000-50,000 includes any numerical value or range within or encompassing such values, e.g., 25, 26, 27, 28, 29 . . . 250, 251, 252, 253, 254 . . . 500, 501, 502, 503, 504 . . . , etc.

[1065] As also used herein a series of ranges are disclosed throughout this document. The use of a series of ranges include combinations of the upper and lower ranges to provide another range. This construction applies regardless of the breadth of the range and in all contexts throughout this patent document. Thus, for example, reference to a series of ranges such as 5-10, 10-20, 20-30, 30-40, 40-50, 50-75, 75-100, 100-150, includes ranges such as 5-20, 5-30, 5-40, 5-50, 5-75, 5-100, 5-150, and 10-30, 10-40, 10-50, 10-75, 10-100, 10-150, and 20-40, 20-50, 20-75, 20-100, 20-150, and so forth.

[1066] For the sake of conciseness, certain abbreviations are used herein. One example is the single letter abbreviation to represent amino acid residues. The amino acids and their corresponding three letter and single letter abbreviations are as follows:

| | | |
|---|---|---|
| alanine | Ala | (A) |
| arginine | Arg | (R) |
| asparagine | Asn | (N) |
| aspartic acid | Asp | (D) |
| cysteine | Cys | (C) |
| glutamic acid | Glu | (E) |
| glutamine | Gln | (Q) |
| glycine | Gly | (G) |
| histidine | His | (H) |
| isoleucine | Ile | (I) |
| leucine | Leu | (L) |
| lysine | Lys | (K) |
| methionine | Met | (M) |
| phenylalanine | Phe | (F) |
| proline | Pro | (P) |
| serine | Ser | (S) |
| threonine | Thr | (T) |
| tryptophan | Trp | (W) |
| tyrosine | Tyr | (Y) |
| valine | Val | (V) |

[1067] The invention is generally disclosed herein using affirmative language to describe the numerous embodiments. The invention also specifically includes embodiments in which particular subject matter is excluded, in full or in part, such as substances or materials, method steps and conditions, protocols, procedures, assays or analysis. Thus, even though the invention is generally not expressed herein in terms of what the invention does not include, aspects that are not expressly included in the invention are nevertheless disclosed herein.

### ASPECTS OF THE PRESENT INVENTION

[1068] The following aspects illustrate and are not intended to limit scope of the present invention. Instead, these aspects provide guidance to any skilled artisan on how to prepare and use compounds, compositions and methods taught by the present invention, where such skilled artisans will appreciate that modifications may be made without departing from the spirit and scope of the invention.

[1069] 1. An isolated monoclonal antibody or antigen binding fragment thereof that binds human interleukin-23 receptor (IL-23R) on a mammalian cell, wherein the antibody or fragment comprises:
[1070] a. an HCDR1, an HCDR2, and an HCDR3 as set forth in SEQ ID NO:236, and an LCDR1, an LCDR2, and an LCDR3 as set forth in SEQ ID NO:237;
[1071] b. an HCDR1, an HCDR2, and an HCDR3 as set forth in SEQ ID NO:798, and an LCDR1, an LCDR2, and an LCDR3 as set forth in SEQ ID NO:799;
[1072] c. an HCDR1, an HCDR2, and an HCDR3 as set forth in SEQ ID NO:792, and an LCDR1, an LCDR2, and an LCDR3 as set forth in SEQ ID NO:793;
[1073] d. an HCDR1, an HCDR2, and an HCDR3 as set forth in SEQ ID NO:786, and an LCDR1, an LCDR2, and an LCDR3 as set forth in SEQ ID NO:787;
[1074] e. an HCDR1, an HCDR2, and an HCDR3 as set forth in SEQ ID NO:138, and an LCDR1, an LCDR2, and an LCDR3 as set forth in SEQ ID NO:139;
[1075] f. an HCDR1, an HCDR2, and an HCDR3 as set forth in SEQ ID NO:144, and an LCDR1, an LCDR2, and an LCDR3 as set forth in SEQ ID NO:145;
[1076] g. an HCDR1, an HCDR2, and an HCDR3 as set forth in SEQ ID NO:152, and an LCDR1, an LCDR2, and an LCDR3 as set forth in SEQ ID NO:153;
[1077] h. an HCDR1, an HCDR2, and an HCDR3 as set forth in SEQ ID NO:154, and an LCDR1, an LCDR2, and an LCDR3 as set forth in SEQ ID NO:155;
[1078] i. an HCDR1, an HCDR2, and an HCDR3 as set forth in SEQ ID NO:156, and an LCDR1, an LCDR2, and an LCDR3 as set forth in SEQ ID NO:157;
[1079] j. an HCDR1, an HCDR2, and an HCDR3 as set forth in SEQ ID NO:160, and an LCDR1, an LCDR2, and an LCDR3 as set forth in SEQ ID NO:161;
[1080] k. an HCDR1, an HCDR2, and an HCDR3 as set forth in SEQ ID NO:164, and an LCDR1, an LCDR2, and an LCDR3 as set forth in SEQ ID NO:165;
[1081] l. an HCDR1, an HCDR2, and an HCDR3 as set forth in SEQ ID NO:166, and an LCDR1, an LCDR2, and an LCDR3 as set forth in SEQ ID NO:167;
[1082] m. an HCDR1, an HCDR2, and an HCDR3 as set forth in SEQ ID NO:168, and an LCDR1, an LCDR2, and an LCDR3 as set forth in SEQ ID NO:169;
[1083] n. an HCDR1, an HCDR2, and an HCDR3 as set forth in SEQ ID NO:174, and an LCDR1, an LCDR2, and an LCDR3 as set forth in SEQ ID NO:175;
[1084] o. an HCDR1, an HCDR2, and an HCDR3 as set forth in SEQ ID NO:788, and an LCDR1, an LCDR2, and an LCDR3 as set forth in SEQ ID NO:789;
[1085] p. an HCDR1, an HCDR2, and an HCDR3 as set forth in SEQ ID NO:186, and an LCDR1, an LCDR2, and an LCDR3 as set forth in SEQ ID NO:187;
[1086] q. an HCDR1, an HCDR2, and an HCDR3 as set forth in SEQ ID NO:828, and an LCDR1, an LCDR2, and an LCDR3 as set forth in SEQ ID NO:829;
[1087] r. an HCDR1, an HCDR2, and an HCDR3 as set forth in SEQ ID NO:790, and an LCDR1, an LCDR2, and an LCDR3 as set forth in SEQ ID NO:791;
[1088] s. an HCDR1, an HCDR2, and an HCDR3 as set forth in SEQ ID NO:188, and an LCDR1, an LCDR2, and an LCDR3 as set forth in SEQ ID NO:189;
[1089] t. an HCDR1, an HCDR2, and an HCDR3 as set forth in SEQ ID NO:884, and an LCDR1, an LCDR2, and an LCDR3 as set forth in SEQ ID NO:885;
[1090] u. an HCDR1, an HCDR2, and an HCDR3 as set forth in SEQ ID NO:192, and an LCDR1, an LCDR2, and an LCDR3 as set forth in SEQ ID NO:193;
[1091] v. an HCDR1, an HCDR2, and an HCDR3 as set forth in SEQ ID NO:194, and an LCDR1, an LCDR2, and an LCDR3 as set forth in SEQ ID NO:195;
[1092] w. an HCDR1, an HCDR2, and an HCDR3 as set forth in SEQ ID NO:198, and an LCDR1, an LCDR2, and an LCDR3 as set forth in SEQ ID NO:199;
[1093] x. an HCDR1, an HCDR2, and an HCDR3 as set forth in SEQ ID NO:200, and an LCDR1, an LCDR2, and an LCDR3 as set forth in SEQ ID NO:201;
[1094] y. an HCDR1, an HCDR2, and an HCDR3 as set forth in SEQ ID NO:202, and an LCDR1, an LCDR2, and an LCDR3 as set forth in SEQ ID NO:203;
[1095] z. an HCDR1, an HCDR2, and an HCDR3 as set forth in SEQ ID NO:204, and an LCDR1, an LCDR2, and an LCDR3 as set forth in SEQ ID NO:205;
[1096] aa. an HCDR1, an HCDR2, and an HCDR3 as set forth in SEQ ID NO:206, and an LCDR1, an LCDR2, and an LCDR3 as set forth in SEQ ID NO:207;
[1097] bb. an HCDR1, an HCDR2, and an HCDR3 as set forth in SEQ ID NO:216, and an LCDR1, an LCDR2, and an LCDR3 as set forth in SEQ ID NO:217;
[1098] cc. an HCDR1, an HCDR2, and an HCDR3 as set forth in SEQ ID NO:222, and an LCDR1, an LCDR2, and an LCDR3 as set forth in SEQ ID NO:223;
[1099] dd. an HCDR1, an HCDR2, and an HCDR3 as set forth in SEQ ID NO:230, and an LCDR1, an LCDR2, and an LCDR3 as set forth in SEQ ID NO:231;
[1100] ee. an HCDR1, an HCDR2, and an HCDR3 as set forth in SEQ ID NO:232, and an LCDR1, an LCDR2, and an LCDR3 as set forth in SEQ ID NO:233;
[1101] ff. an HCDR1, an HCDR2, and an HCDR3 as set forth in SEQ ID NO:234, and an LCDR1, an LCDR2, and an LCDR3 as set forth in SEQ ID NO:235;
[1102] gg. an HCDR1, an HCDR2, and an HCDR3 as set forth in SEQ ID NO:238, and an LCDR1, an LCDR2, and an LCDR3 as set forth in SEQ ID NO:239;
[1103] hh. an HCDR1, an HCDR2, and an HCDR3 as set forth in SEQ ID NO:246, and an LCDR1, an LCDR2, and an LCDR3 as set forth in SEQ ID NO:247;
[1104] ii. an HCDR1, an HCDR2, and an HCDR3 as set forth in SEQ ID NO:248, and an LCDR1, an LCDR2, and an LCDR3 as set forth in SEQ ID NO:249;
[1105] jj. an HCDR1, an HCDR2, and an HCDR3 as set forth in SEQ ID NO:254, and an LCDR1, an LCDR2, and an LCDR3 as set forth in SEQ ID NO:255;
[1106] kk. an HCDR1, an HCDR2, and an HCDR3 as set forth in SEQ ID NO:260, and an LCDR1, an LCDR2, and an LCDR3 as set forth in SEQ ID NO:261;
[1107] ll. an HCDR1, an HCDR2, and an HCDR3 as set forth in SEQ ID NO:262, and a LCDR1, an LCDR2, and an LCDR3 as set forth in SEQ ID NO:263; or
[1108] mm. an HCDR1, an HCDR2, and an HCDR3 as set forth in SEQ ID NO:264, and an LCDR1, an LCDR2, and an LCDR3 as set forth in SEQ ID NO:265.

[1109] 2. The isolated monoclonal antibody or antigen binding fragment thereof of aspect 1 that binds human interleukin-23 receptor (IL-23R) on a mammalian cell, wherein the antibody or fragment comprises:
[1110] nn. a VH comprising an HCDR1, an HCDR2, and an HCDR3 having an amino acid sequence of SEQ ID NOs:570, 571, and 572, respectively, and a VL comprising an LCDR1, an LCDR2, and an LCDR3 having an amino acid sequence of SEQ ID NOs:573, 574, and 575, respectively;
[1111] oo. a VH comprising an HCDR1, an HCDR2, and an HCDR3 having an amino acid sequence of SEQ ID NOs:936, 937, and 938, respectively, and a VL comprising an LCDR1, an LCDR2, and an LCDR3 having an amino acid sequence of SEQ ID NOs:939, 940, and 941, respectively;
[1112] pp. a VH comprising an HCDR1, an HCDR2, and an HCDR3 having an amino acid sequence of SEQ ID NOs:918, 919, and 920, respectively, and a VL comprising an LCDR1, an LCDR2, and an LCDR3 having an amino acid sequence of SEQ ID NOs:921, 922, and 923, respectively;
[1113] qq. a VH comprising an HCDR1, an HCDR2, and an HCDR3 having an amino acid sequence of SEQ ID NOs:900, 901, and 902, respectively, and a VL comprising an LCDR1, an LCDR2, and an LCDR3 having an amino acid sequence of SEQ ID NOs:903, 904, and 905, respectively;
[1114] rr. a VH comprising an HCDR1, an HCDR2, and an HCDR3 having an amino acid sequence of SEQ ID NOs:276, 277, and 278, respectively, and a VL comprising an LCDR1, an LCDR2, and an LCDR3 having an amino acid sequence of SEQ ID NOs:279, 280, and 281, respectively;
[1115] ss. a VH comprising an HCDR1, an HCDR2, and an HCDR3 having an amino acid sequence of SEQ ID NOs:294, 295, and 296, respectively, and a VL comprising an LCDR1, an LCDR2, and an LCDR3 having an amino acid sequence of SEQ ID NOs:297, 298, and 299, respectively;
[1116] tt. a VH comprising an HCDR1, an HCDR2, and an HCDR3 having an amino acid sequence of SEQ ID NOs:318, 319, and 320, respectively, and a VL comprising an LCDR1, an LCDR2, and an LCDR3 having an amino acid sequence of SEQ ID NOs:321, 322, and 323, respectively;
[1117] uu. a VH comprising an HCDR1, an HCDR2, and an HCDR3 having an amino acid sequence of SEQ ID NOs:324, 325, and 326, respectively, and a VL comprising an LCDR1, an LCDR2, and an LCDR3 having an amino acid sequence of SEQ ID NOs:327, 328, and 329,
[1118] vv. a VH comprising an HCDR1, an HCDR2, and an HCDR3 having an amino acid sequence of SEQ ID NOs:330, 331, and 332, respectively, and a VL comprising an LCDR1, an LCDR2, and an LCDR3 having an amino acid sequence of SEQ ID NOs:333, 334, and 335, respectively;
[1119] ww. a VH comprising an HCDR1, an HCDR2, and an HCDR3 having an amino acid sequence of SEQ ID NOs:342, 343, and 344, respectively, and a VL comprising an LCDR1, an LCDR2, and an LCDR3 having an amino acid sequence of SEQ ID NOs:345, 346, and 347, respectively;
[1120] xx. a VH comprising an HCDR1, an HCDR2, and an HCDR3 having an amino acid sequence of SEQ ID NOs:354, 355, and 356, respectively, and a VL comprising an LCDR1, an LCDR2, and an LCDR3 having an amino acid sequence of SEQ ID NOs:357, 358, and 359, respectively;
[1121] yy. a VH comprising an HCDR1, an HCDR2, and an HCDR3 having an amino acid sequence of SEQ ID NOs:360, 361, and 362, respectively, and a VL comprising an LCDR1, an LCDR2, and an LCDR3 having an amino acid sequence of SEQ ID NOs:363, 364, and 365, respectively;
[1122] zz. a VH comprising an HCDR1, an HCDR2, and an HCDR3 having an amino acid sequence of SEQ ID NOs:366, 367, and 368, respectively, and a VL comprising an LCDR1, an LCDR2, and an LCDR3 having an amino acid sequence of SEQ ID NOs:369, 370, and 371, respectively;
[1123] aaa. a VH comprising an HCDR1, an HCDR2, and an HCDR3 having an amino acid sequence of SEQ ID NOs:384, 385, and 386, respectively, and a VL comprising an LCDR1, an LCDR2, and an LCDR3 having an amino acid sequence of SEQ ID NOs:387, 388, and 389, respectively;
[1124] bbb. a VH comprising an HCDR1, an HCDR2, and an HCDR3 having an amino acid sequence of SEQ ID NOs:906, 907, and 908, respectively, and a VL comprising an LCDR1, an LCDR2, and an LCDR3 having an amino acid sequence of SEQ ID NOs:909, 910, and 911, respectively;
[1125] ccc. a VH comprising an HCDR1, an HCDR2, and an HCDR3 having an amino acid sequence of SEQ ID NOs:420, 421, and 422, respectively, and a VL comprising an LCDR1, an LCDR2, and an LCDR3 having an amino acid sequence of SEQ ID NOs:423, 424, and 425, respectively;
[1126] ddd. a VH comprising an HCDR1, an HCDR2, and an HCDR3 having an amino acid sequence of SEQ ID NOs:1026, 1027, and 1028, respectively, and a VL comprising an LCDR1, an LCDR2, and an LCDR3 having an amino acid sequence of SEQ ID NOs:1029, 1030, and 1031,
[1127] eee. a VH comprising an HCDR1, an HCDR2, and an HCDR3 having an amino acid sequence of SEQ ID NOs:912, 913, and 914, respectively, and a VL comprising an LCDR1, an LCDR2, and an LCDR3 having an amino acid sequence of SEQ ID NOs:915, 916, and 917, respectively;
[1128] fff. a VH comprising an HCDR1, an HCDR2, and an HCDR3 having an amino acid sequence of SEQ ID NOs:426, 427, and 428, respectively, and a VL comprising an LCDR1, an LCDR2, and an LCDR3 having an amino acid sequence of SEQ ID NOs:429, 430, and 431, respectively;
[1129] ggg. a VH comprising an HCDR1, an HCDR2, and an HCDR3 having an amino acid sequence of SEQ ID NOs:1194, 1195, and 1196, respectively, and a VL comprising an LCDR1, an LCDR2, and an LCDR3 having an amino acid sequence of SEQ ID NOs:1197, 1198, and 1199, respectively;
[1130] hhh. a VH comprising an HCDR1, an HCDR2, and an HCDR3 having an amino acid sequence of SEQ ID NOs:438, 439, and 440, respectively, and a VL comprising an LCDR1, an LCDR2, and an LCDR3 having an amino acid sequence of SEQ ID NOs:441, 442, and 443, respectively;
[1131] iii. a VH comprising an HCDR1, an HCDR2, and an HCDR3 having an amino acid sequence of SEQ ID NOs:444, 445, and 446, respectively, and a VL comprising an LCDR1, an LCDR2, and an LCDR3 having an amino acid sequence of SEQ ID NOs:447, 448, and 449, respectively;
[1132] jjj. a VH comprising an HCDR1, an HCDR2, and an HCDR3 having an amino acid sequence of SEQ ID NOs:456, 457, and 458, respectively, and a VL comprising an LCDR1, an LCDR2, and an LCDR3 having an amino acid sequence of SEQ ID NOs:459, 460, and 461, respectively;
[1133] kkk. a VH comprising an HCDR1, an HCDR2, and an HCDR3 having an amino acid sequence of SEQ ID NOs:462, 463, and 464, respectively, and a VL comprising an LCDR1, an LCDR2, and an LCDR3 having an amino acid sequence of SEQ ID NOs:465, 466, and 467, respectively;
[1134] lll. a VH comprising an HCDR1, an HCDR2, and an HCDR3 having an amino acid sequence of SEQ ID NOs:468, 469, and 470, respectively, and a VL comprising an LCDR1, an LCDR2, and an LCDR3 having an amino acid sequence of SEQ ID NOs:471, 472, and 473, respectively;
[1135] mmm. a VH comprising an HCDR1, an HCDR2, and an HCDR3 having an amino acid sequence of SEQ ID NOs:474, 475, and 476, respectively, and a VL comprising an LCDR1, an LCDR2, and an LCDR3 having an amino acid sequence of SEQ ID NOs:477, 478, and 479,
[1136] nnn. a VH comprising an HCDR1, an HCDR2, and an HCDR3 having an amino acid sequence of SEQ ID NOs:480, 481, and 482, respectively, and a VL comprising an LCDR1, an LCDR2, and an LCDR3 having an amino acid sequence of SEQ ID NOs:483, 484, and 485, respectively;
[1137] ooo. a VH comprising an HCDR1, an HCDR2, and an HCDR3 having an amino acid sequence of SEQ ID NOs:510, 511, and 512, respectively, and a VL comprising an LCDR1, an LCDR2, and an LCDR3 having an amino acid sequence of SEQ ID NOs:513, 514, and 515, respectively;
[1138] ppp. a VH comprising an HCDR1, an HCDR2, and an HCDR3 having an amino acid sequence of SEQ ID NOs:528, 529, and 530, respectively, and a VL comprising an LCDR1, an LCDR2, and an LCDR3 having an amino acid sequence of SEQ ID NOs:531, 532, and 533, respectively;
[1139] qqq. a VH comprising an HCDR1, an HCDR2, and an HCDR3 having an amino acid sequence of SEQ ID NOs:552, 553, and 554, respectively, and a VL comprising an LCDR1, an LCDR2, and an LCDR3 having an amino acid sequence of SEQ ID NOs:555, 556, and 557, respectively;
[1140] rrr. a VH comprising an HCDR1, an HCDR2, and an HCDR3 having an amino acid sequence of SEQ ID NOs:558, 559, and 560, respectively, and a VL comprising an LCDR1, an LCDR2, and an LCDR3 having an amino acid sequence of SEQ ID NOs:561, 562, and 563, respectively;
[1141] sss. a VH comprising an HCDR1, an HCDR2, and an HCDR3 having an amino acid sequence of SEQ ID NOs:564, 565, and 566, respectively, and a VL comprising an LCDR1, an LCDR2, and an LCDR3 having an amino acid sequence of SEQ ID NOs:567, 568, and 569, respectively;
[1142] ttt. a VH comprising an HCDR1, an HCDR2, and an HCDR3 having an amino acid sequence of SEQ ID NOs:576, 577, and 578, respectively, and a VL comprising an LCDR1, an LCDR2, and an LCDR3 having an amino acid sequence of SEQ ID NOs:579, 580, and 581, respectively;
[1143] uuu. a VH comprising an HCDR1, an HCDR2, and an HCDR3 having an amino acid sequence of SEQ ID NOs:600, 601, and 602, respectively, and a VL comprising an LCDR1, an LCDR2, and an LCDR3 having an amino acid sequence of SEQ ID NOs:603, 604, and 605, respectively;
[1144] vvv. a VH comprising an HCDR1, an HCDR2, and an HCDR3 having an amino acid sequence of SEQ ID NOs:606, 607, and 608, respectively, and a VL comprising an LCDR1, an LCDR2, and an LCDR3 having an amino acid sequence of SEQ ID NOs:609, 610, and 611,
[1145] www. a VH comprising an HCDR1, an HCDR2, and an HCDR3 having an amino acid sequence of SEQ ID NOs:624, 625, and 626, respectively, and a VL comprising an LCDR1, an LCDR2, and an LCDR3 having an amino acid sequence of SEQ ID NOs:627, 628, and 629, respectively;
[1146] xxx. a VH comprising an HCDR1, an HCDR2, and an HCDR3 having an amino acid sequence of SEQ ID NOs:642, 643, and 644, respectively, and a VL comprising an LCDR1, an LCDR2, and an LCDR3 having an amino acid sequence of SEQ ID NOs:645, 646, and 647, respectively;
[1147] yyy. a VH comprising an HCDR1, an HCDR2, and an HCDR3 having an amino acid sequence of SEQ ID NOs:648, 649, and 650, respectively, and a VL comprising an LCDR1, an LCDR2, and an LCDR3 having an amino acid sequence of SEQ ID NOs:651, 652, and 653, respectively; or
[1148] zzz. a VH comprising an HCDR1, an HCDR2, and an HCDR3 having an amino acid sequence of SEQ ID NOs:654, 655, and 656, respectively, and a VL comprising an LCDR1, an LCDR2, and an LCDR3 having an amino acid sequence of SEQ ID NOs:657, 658, and 659, respectively.

[1149] 3. The isolated monoclonal antibody or antigen binding fragment thereof of aspect 1 or 2 that binds human interleukin-23 receptor (IL-23R) on a mammalian cell, wherein the antibody or fragment comprises:
[1150] a. a VH comprising the amino acid sequence of SEQ ID NO:236, and a VL comprising the amino acid sequence of SEQ ID NO:237;
[1151] b. a VH comprising the amino acid sequence of SEQ ID NO:798, and a VL comprising the amino acid sequence of SEQ ID NO:799;
[1152] c. a VH comprising the amino acid sequence of SEQ ID NO:792, and a VL comprising the amino acid sequence of SEQ ID NO:793;
[1153] d. a VH comprising the amino acid sequence of SEQ ID NO:786, and a VL comprising the amino acid sequence of SEQ ID NO:787;
[1154] e. a VH comprising the amino acid sequence of SEQ ID NO:138, and a VL comprising the amino acid sequence of SEQ ID NO:139;
[1155] f. a VH comprising the amino acid sequence of SEQ ID NO:144, and a VL comprising the amino acid sequence of SEQ ID NO:145;
[1156] g. a VH comprising the amino acid sequence of SEQ ID NO:152, and a VL comprising the amino acid sequence of SEQ ID NO:153;
[1157] h. a VH comprising the amino acid sequence of SEQ ID NO:154, and a VL comprising the amino acid sequence of SEQ ID NO:155;
[1158] i. a VH comprising the amino acid sequence of SEQ ID NO:156, and a VL comprising the amino acid sequence of SEQ ID NO:157;
[1159] j. a VH comprising the amino acid sequence of SEQ ID NO:160, and a VL comprising the amino acid sequence of SEQ ID NO:161;
[1160] k. a VH comprising the amino acid sequence of SEQ ID NO:164, and a VL comprising the amino acid sequence of SEQ ID NO:165;
[1161] l. a VH comprising the amino acid sequence of SEQ ID NO:166, and a VL comprising the amino acid sequence of SEQ ID NO:167;
[1162] m. a VH comprising the amino acid sequence of SEQ ID NO:168, and a VL comprising the amino acid sequence of SEQ ID NO:169;
[1163] n. a VH comprising the amino acid sequence of SEQ ID NO:174, and a VL comprising the amino acid sequence of SEQ ID NO:175;
[1164] o. a VH comprising the amino acid sequence of SEQ ID NO:788, and a VL comprising the amino acid sequence of SEQ ID NO:789;
[1165] p. a VH comprising the amino acid sequence of SEQ ID NO:186, and a VL comprising the amino acid sequence of SEQ ID NO:187;
[1166] q. a VH comprising the amino acid sequence of SEQ ID NO:828, and a VL comprising the amino acid sequence of SEQ ID NO:829;
[1167] r. a VH comprising the amino acid sequence of SEQ ID NO:790, and a VL comprising the amino acid sequence of SEQ ID NO:791;
[1168] s. a VH comprising the amino acid sequence of SEQ ID NO:188, and a VL comprising the amino acid sequence of SEQ ID NO:189;
[1169] t. a VH comprising the amino acid sequence of SEQ ID NO:884, and a VL comprising the amino acid sequence of SEQ ID NO:885;
[1170] u. a VH comprising the amino acid sequence of SEQ ID NO:192, and a VL comprising the amino acid sequence of SEQ ID NO:193;
[1171] v. a VH comprising the amino acid sequence of SEQ ID NO:194, and a VL comprising the amino acid sequence of SEQ ID NO:195;
[1172] w. a VH comprising the amino acid sequence of SEQ ID NO:198, and a VL comprising the amino acid sequence of SEQ ID NO:199;
[1173] x. a VH comprising the amino acid sequence of SEQ ID NO:200, and a VL comprising the amino acid sequence of SEQ ID NO:201;
[1174] y. a VH comprising the amino acid sequence of SEQ ID NO:202, and a VL comprising the amino acid sequence of SEQ ID NO:203;
[1175] z. a VH comprising the amino acid sequence of SEQ ID NO:204, and a VL comprising the amino acid sequence of SEQ ID NO:205;
[1176] aa. a VH comprising the amino acid sequence of SEQ ID NO:206, and a VL comprising the amino acid sequence of SEQ ID NO:207;
[1177] bb. a VH comprising the amino acid sequence of SEQ ID NO:216, and a VL comprising the amino acid sequence of SEQ ID NO:217;
[1178] cc. a VH comprising the amino acid sequence of SEQ ID NO:222, and a VL comprising the amino acid sequence of SEQ ID NO:223;
[1179] dd. a VH comprising the amino acid sequence of SEQ ID NO:230, and a VL comprising the amino acid sequence of SEQ ID NO:231;
[1180] ee. a VH comprising the amino acid sequence of SEQ ID NO:232, and a VL comprising the amino acid sequence of SEQ ID NO:233;
[1181] ff. a VH comprising the amino acid sequence of SEQ ID NO:234, and a VL comprising the amino acid sequence of SEQ ID NO:235;
[1182] gg. a VH comprising the amino acid sequence of SEQ ID NO:238, and a VL comprising the amino acid sequence of SEQ ID NO:239;
[1183] hh. a VH comprising the amino acid sequence of SEQ ID NO:246, and a VL comprising the amino acid sequence of SEQ ID NO:247;
[1184] ii. a VH comprising the amino acid sequence of SEQ ID NO:248, and a VL comprising the amino acid sequence of SEQ ID NO:249;
[1185] jj. a VH comprising the amino acid sequence of SEQ ID NO:254, and a VL comprising the amino acid sequence of SEQ ID NO:255;
[1186] kk. a VH comprising the amino acid sequence of SEQ ID NO:260, and a VL comprising the amino acid sequence of SEQ ID NO:261;
[1187] ll. a VH comprising the amino acid sequence of SEQ ID NO:262, and a VL comprising the amino acid sequence of SEQ ID NO:263; or
[1188] mm. a VH comprising the amino acid sequence of SEQ ID NO:264, and a VL comprising the amino acid sequence of SEQ ID NO:265.

[1189] 4. An isolated monoclonal antibody or active fragment thereof that binds human interleukin-23 receptor (IL-23R) on a mammalian cell of aspect 1, wherein the antibody or fragment comprises:
[1190] a. an HCDR1, and HCDR2 and an HCDR3 as set forth in SEQ ID NO:786, and an LCDR1, LCDR2 and LCDR3 set forth in SEQ ID NO:787;
[1191] b. an HCDR1, and HCDR2 and an HCDR3 as set forth in SEQ ID NO:790, and an LCDR1, LCDR2 and LCDR3 set forth in SEQ ID NO:791;
[1192] c. an HCDR1, and HCDR2 and an HCDR3 as set forth in SEQ ID NO:792, and an LCDR1, LCDR2 and LCDR3 set forth in SEQ ID NO:793;
[1193] d. an HCDR1, and HCDR2 and an HCDR3 as set forth in SEQ ID NO:798, and an LCDR1, LCDR2 and LCDR3 set forth in SEQ ID NO:799; or
[1194] e. an HCDR1, and HCDR2 and an HCDR3 as set forth in SEQ ID NO:236, and an LCDR1, LCDR2 and LCDR3 set forth in SEQ ID NO:237.

[1195] 5. The isolated monoclonal antibody or antigen binding fragment thereof of aspect 2 that binds human interleukin-23 receptor (IL-23R) on a mammalian cell, wherein the antibody or fragment comprises:
[1196] a. a VH comprising an HCDR1, and HCDR2 and an HCDR3 having an amino acid sequence of SEQ ID NOs:570, 571, and 572, respectively and a VL comprising an LCDR1, an LCDR2, and an LCDR3 having an amino acid sequence of SEQ ID NOs:573, 574, and 575, respectively;
[1197] b. a VH comprising an HCDR1, and HCDR2 and an HCDR3 having an amino acid sequence of SEQ ID NOs:936, 937, and 938, respectively and a VL comprising an LCDR1, an LCDR2, and an LCDR3 having an amino acid sequence of SEQ ID NOs:939, 940, and 941, respectively;
[1198] c. a VH comprising an HCDR1, and HCDR2 and an HCDR3 having an amino acid sequence of SEQ ID NOs:918, 919, and 920, respectively and a VL comprising an LCDR1, an LCDR2, and an LCDR3 having an amino acid sequence of SEQ ID NOs:921, 922, and 923, respectively;
[1199] d. a VH comprising an HCDR1, and HCDR2 and an HCDR3 having an amino acid sequence of SEQ ID NOs:900, 901, and 902, respectively and a VL comprising an LCDR1, an LCDR2, and an LCDR3 having an amino acid sequence of SEQ ID NOs:903, 904, and 905, respectively; or
[1200] e. a VH comprising an HCDR1, and HCDR2 and an HCDR3 having an amino acid sequence of SEQ ID NOs:912, 913, and 914, respectively and a VL comprising an LCDR1, an LCDR2, and an LCDR3 having an amino acid sequence of SEQ ID NOs:915, 916, and 917, respectively.

[1201] 6. The isolated monoclonal antibody or antigen binding fragment thereof of aspect 3 that binds human interleukin-23 receptor (IL-23R) on a mammalian cell, wherein the antibody or fragment comprises:
[1202] a. a VH comprising the amino acid sequence of SEQ ID NO:236, and a VL comprising the amino acid sequence of SEQ ID NO:237;
[1203] b. a VH comprising the amino acid sequence of SEQ ID NO:798, and a VL comprising the amino acid sequence of SEQ ID NO:799;
[1204] c. a VH comprising the amino acid sequence of SEQ ID NO:792, and a VL comprising the amino acid sequence of SEQ ID NO:793;
[1205] d. a VH comprising the amino acid sequence of SEQ ID NO:786, and a VL comprising the amino acid sequence of SEQ ID NO:787; or
[1206] e. a VH comprising the amino acid sequence of SEQ ID NO:790, and a VL comprising the amino acid sequence of SEQ ID NO:791.

[1207] 7. The isolated monoclonal antibody or antigen binding fragment thereof of any of aspects 1 to 6 that binds human interleukin-23 receptor (IL-23R) on a mammalian cell, wherein the antibody or fragment comprises:
[1208] a. a VH comprising an HCDR1, and HCDR2 and an HCDR3 having an amino acid sequence of SEQ ID NOs:918, 919, and 920, respectively and a VL comprising an LCDR1, an LCDR2, and an LCDR3 having an amino acid sequence of SEQ ID NOs:921, 922, and 923, respectively;
[1209] b. a VH comprising an HCDR1, and HCDR2 and an HCDR3 having an amino acid sequence of SEQ ID NOs:936, 937, and 938, respectively and a VL comprising an LCDR1, an LCDR2, and an LCDR3 having an amino acid sequence of SEQ ID NOs:939, 940, and 941, respectively; or
[1210] c. a VH comprising an HCDR1, and HCDR2 and an HCDR3 having an amino acid sequence of SEQ ID NOs:570, 571, and 572, respectively and a VL comprising an LCDR1, an LCDR2, and an LCDR3 having an amino acid sequence of SEQ ID NOs:573, 574, and 575, respectively.

[1211] 8. The isolated monoclonal antibody or antigen binding fragment thereof of any of aspects 1 to 7 that binds human interleukin-23 receptor (IL-23R) on a mammalian cell, wherein the antibody or fragment comprises:
[1212] a. a VH comprising the amino acid sequence of SEQ ID NO:792, and a VL comprising the amino acid sequence of SEQ ID NO:793;
[1213] b. a VH comprising the amino acid sequence of SEQ ID NO:798, and a VL comprising the amino acid sequence of SEQ ID NO:799; or
[1214] c. a VH comprising the amino acid sequence of SEQ ID NO:236, and a VL comprising the amino acid sequence of SEQ ID NO:237.

[1215] 9. The isolated monoclonal antibody or antigen binding fragment thereof of any of aspects 1-8, wherein the mammalian cell is a human or rat cell.

[1216] 10. The isolated monoclonal antibody or antigen binding fragment thereof of any of aspects 1-9, wherein the cell is a primary immune cell.

[1217] 11. An isolated monoclonal antibody or antigen binding fragment thereof which recognizes human and rat interleukin-23 receptor (IL-23R), wherein the antibody or fragment comprises:
[1218] a. an HCDR1, and HCDR2 and an HCDR3 as set forth in SEQ ID NO:202, and an LCDR1, LCDR2 and LCDR3 set forth in SEQ ID NO:203;
[1219] b. an HCDR1, and HCDR2 and an HCDR3 as set forth in SEQ ID NO:252, and an LCDR1, LCDR2 and LCDR3 set forth in SEQ ID NO:253;
[1220] c. an HCDR1, and HCDR2 and an HCDR3 as set forth in SEQ ID NO:156, and an LCDR1, LCDR2 and LCDR3 set forth in SEQ ID NO:157;
[1221] d. an HCDR1, and HCDR2 and an HCDR3 as set forth in SEQ ID NO:798, and an LCDR1, LCDR2 and LCDR3 set forth in SEQ ID NO:799;
[1222] e. an HCDR1, and HCDR2 and an HCDR3 as set forth in SEQ ID NO:150, and an LCDR1, LCDR2 and LCDR3 set forth in SEQ ID NO:151;
[1223] f. an HCDR1, and HCDR2 and an HCDR3 as set forth in SEQ ID NO:204, and an LCDR1, LCDR2 and LCDR3 set forth in SEQ ID NO:205;
[1224] g. an HCDR1, and HCDR2 and an HCDR3 as set forth in SEQ ID NO:884, and an LCDR1, LCDR2 and LCDR3 set forth in SEQ ID NO:885;
[1225] h. an HCDR1, and HCDR2 and an HCDR3 as set forth in SEQ ID NO:188, and an LCDR1, LCDR2 and LCDR3 set forth in SEQ ID NO:189; or
[1226] i. an HCDR1, and HCDR2 and an HCDR3 as set forth in SEQ ID NO:212, and an LCDR1, LCDR2 and LCDR3 set forth in SEQ ID NO:213.

[1227] 12. The isolated monoclonal antibody or antigen binding fragment thereof of aspect 11 which recognizes human and rat IL-23R, wherein the antibody or fragment comprises:
[1228] a. a VH comprising an HCDR1, and HCDR2 and an HCDR3 having an amino acid sequence of SEQ ID NOs:468, 469, and 470, respectively and a VL comprising an LCDR1, an LCDR2, and an LCDR3 having an amino acid sequence of SEQ ID NOs:471, 472, and 473, respectively;
[1229] b. a VH comprising an HCDR1, and HCDR2 and an HCDR3 having an amino acid sequence of SEQ ID NOs:618, 619, and 620, respectively and a VL comprising an LCDR1, an LCDR2, and an LCDR3 having an amino acid sequence of SEQ ID NOs:621, 622, and 623, respectively;
[1230] c. a VH comprising an HCDR1, and HCDR2 and an HCDR3 having an amino acid sequence of SEQ ID NOs:330, 331, and 332, respectively and a VL comprising an LCDR1, an LCDR2, and an LCDR3 having an amino acid sequence of SEQ ID NOs:333, 334, and 335, respectively;
[1231] d. a VH comprising an HCDR1, and HCDR2 and an HCDR3 having an amino acid sequence of SEQ ID NOs:936,937, and 938, respectively and a VL comprising an LCDR1, an LCDR2, and an LCDR3 having an amino acid sequence of SEQ ID NOs:939, 940, and 941, respectively;
[1232] e. a VH comprising an HCDR1, and HCDR2 and an HCDR3 having an amino acid sequence of SEQ ID NOs:312, 313, and 314, respectively and a VL comprising an LCDR1, an LCDR2, and an LCDR3 having an amino acid sequence of SEQ ID NOs:315, 316, and 317, respectively;
[1233] f. a VH comprising an HCDR1, and HCDR2 and an HCDR3 having an amino acid sequence of SEQ ID NOs:474, 475, and 476, respectively and a VL comprising an LCDR1, an LCDR2, and an LCDR3 having an amino acid sequence of SEQ ID NOs:477, 478, and 479, respectively;
[1234] g. a VH comprising an HCDR1, and HCDR2 and an HCDR3 having an amino acid sequence of SEQ ID NOs:1194, 1195, and 1196, respectively and a VL comprising an LCDR1, an LCDR2, and an LCDR3 having an amino acid sequence of SEQ ID NOs:1197, 1198, and 1199, respectively;
[1235] h. a VH comprising an HCDR1, and HCDR2 and an HCDR3 having an amino acid sequence of SEQ ID NOs:426, 427, and 428, respectively and a VL comprising an LCDR1, an LCDR2, and an LCDR3 having an amino acid sequence of SEQ ID NOs:429, 430, and 431, respectively; or
[1236] i. a VH comprising an HCDR1, and HCDR2 and an HCDR3 having an amino acid sequence of SEQ ID NOs:498, 499, and 500, respectively and a VL comprising an LCDR1, an LCDR2, and an LCDR3 having an amino acid sequence of SEQ ID NOs:501, 502, and 503, respectively.

[1237] 13. The isolated monoclonal antibody or antigen binding fragment thereof of any of aspects 11 or 12 which recognizes human and rat IL-23R, wherein the antibody or fragment comprises:
[1238] a. a VH comprising the amino acid sequence of SEQ ID NO:202, and a VL comprising the amino acid sequence of SEQ ID NO:203;
[1239] b. a VH comprising the amino acid sequence of SEQ ID NO:252, and a VL comprising the amino acid sequence of SEQ ID NO:253;
[1240] c. a VH comprising the amino acid sequence of SEQ ID NO:156, and a VL comprising the amino acid sequence of SEQ ID NO:157;
[1241] d. a VH comprising the amino acid sequence of SEQ ID NO:798, and a VL comprising the amino acid sequence of SEQ ID NO:799;
[1242] e. a VH comprising the amino acid sequence of SEQ ID NO:150, and a VL comprising the amino acid sequence of SEQ ID NO:151;
[1243] f. a VH comprising the amino acid sequence of SEQ ID NO:204, and a VL comprising the amino acid sequence of SEQ ID NO:205;
[1244] g. a VH comprising the amino acid sequence of SEQ ID NO:884, and a VL comprising the amino acid sequence of SEQ ID NO:885;
[1245] h. a VH comprising the amino acid sequence of SEQ ID NO:188, and a VL comprising the amino acid sequence of SEQ ID NO:189; or
[1246] i. a VH comprising the amino acid sequence of SEQ ID NO:212, and a VL comprising the amino acid sequence of SEQ ID NO:213.

[1247] 14. An isolated monoclonal antibody or antigen binding fragment thereof that binds interleukin-23 receptor (IL-23R) comprising a VL comprising CDR sequences of an LCDR1 SEQ ID NO: 1252, an LCDR2 SEQ ID NO:1253, and an LCDR3 SEQ ID NO:1254 and a VH comprising CDR sequences selected from:
[1248] a. an HCDR1 SEQ ID NO:900, an HCDR2 SEQ ID NO:901 and an HCDR3 SEQ ID NO:902;
[1249] b. an HCDR1 SEQ ID NO:906, an HCDR2 SEQ ID NO:907, and an HCDR3 SEQ ID NO:908;
[1250] c. an HCDR1 SEQ ID NO:912, an HCDR2 SEQ ID NO:913, and an HCDR3 SEQ ID NO:914;
[1251] d. an HCDR1 SEQ ID NO:918, an HCDR2 SEQ ID NO:919, and an HCDR3 SEQ ID NO:920;
[1252] e. an HCDR1 SEQ ID NO:942, an HCDR2 SEQ ID NO:943, and an HCDR3 SEQ ID NO:944;
[1253] f. an HCDR1 SEQ ID NO:948, an HCDR2 SEQ ID NO:949, and an HCDR3 SEQ ID NO:950;
[1254] g. an HCDR1 SEQ ID NO: 1014, an HCDR2 SEQ ID NO: 1015, and an HCDR3 SEQ ID NO:1016;
[1255] h. an HCDR1 SEQ ID NO: 1026, an HCDR2 SEQ ID NO: 1027, and an HCDR3 SEQ ID NO: 1028; and
[1256] i. an HCDR1 SEQ ID NO:1152, an HCDR2 SEQ ID NO:1153, and an HCDR3 SEQ ID NO:1154.

[1257] 15. The isolated monoclonal antibody or antigen binding fragment thereof of aspect 13 comprising a VL comprising CDR sequences of an LCDR1 SEQ ID NO:1252, an LCDR2 SEQ ID NO: 1253, and an LCDR3 SEQ ID NO: 1254 or VL having the amino acid sequence SEQ ID NO: 1247 and a VH sequence selected from SEQ ID NO:786, 788, 790, 792, 800, 802, 824, 828 and 870.

[1258] 16. An isolated monoclonal antibody or antigen binding fragment thereof that binds interleukin-23 receptor (IL-23R) comprising a VL comprising CDR sequences of an LCDR1 SEQ ID NO: 1255, an LCDR2 SEQ ID NO:1256, and an LCDR3 SEQ ID NO:1257 and a VH comprising CDR sequences selected from:
[1259] a. an HCDR1 SEQ ID NO:924, an HCDR2 SEQ ID NO:925, and an HCDR3 SEQ ID NO:926;
[1260] b. an HCDR1 SEQ ID NO: 1002, an HCDR2 SEQ ID NO: 1003, and an HCDR3 SEQ ID NO: 1004;
[1261] c. an HCDR1 SEQ ID NO:1032, an HCDR2 SEQ ID NO:1033, and an HCDR3 SEQ ID NO:1034;
[1262] d. an HCDR1 SEQ ID NO: 1044, an HCDR2 SEQ ID NO: 1045, and an HCDR3 SEQ ID NO:1046;
[1263] e. an HCDR1 SEQ ID NO:1050, an HCDR2 SEQ ID NO:1051, and an HCDR3 SEQ ID NO:1052;
[1264] f. an HCDR1 SEQ ID NO: 1056, an HCDR2 SEQ ID NO: 1057, and an HCDR3 SEQ ID NO:1058;
[1265] g. an HCDR1 SEQ ID NO: 1062, an HCDR2 SEQ ID NO: 1063, and an HCDR3 SEQ ID NO: 1064;
[1266] h. an HCDR1 SEQ ID NO: 1068, an HCDR2 SEQ ID NO: 1069, and an HCDR3 SEQ ID NO: 1070;
[1267] i. an HCDR1 SEQ ID NO:1080, an HCDR2 SEQ ID NO:1081, and an HCDR3 SEQ ID NO: 1082;
[1268] j. an HCDR1 SEQ ID NO:1092, an HCDR2 SEQ ID NO:1093, and an HCDR3 SEQ ID NO: 1094;
[1269] k. an HCDR1 SEQ ID NO: 1098, an HCDR2 SEQ ID NO: 1099, and an HCDR3 SEQ ID NO: 1100;
[1270] l. an HCDR1 SEQ ID NO:1110, an HCDR2 SEQ ID NO:1111, and an HCDR3 SEQ ID NO: 1112;
[1271] m. an HCDR1 SEQ ID NO:1122, an HCDR2 SEQ ID NO:1123, and an HCDR3 SEQ ID NO: 1124;
[1272] n. an HCDR1 SEQ ID NO:1140, an HCDR2 SEQ ID NO:1141, and an HCDR3 SEQ ID NO: 1142;
[1273] o. an HCDR1 SEQ ID NO: 1146, an HCDR2 SEQ ID NO: 1147, and an HCDR3 SEQ ID NO:1148; and
[1274] p. an HCDR1 SEQ ID NO: 1158, an HCDR2 SEQ ID NO: 1159, and an HCDR3 SEQ ID NO: 1160.

[1275] 17. The isolated monoclonal antibody or antigen binding fragment thereof of aspect 16 comprising a VL comprising CDR sequences of an LCDR1 SEQ ID NO:1255, an LCDR2 SEQ ID NO: 1256, and an LCDR3 SEQ ID NO: 1257 or having the amino acid sequence SEQ ID NO:1248 and a VH sequence selected from SEQ ID NO:794, 820, 830, 834, 836, 838, 840, 842, 846, 850, 852, 856, 860, 866, 868 and 872.

[1276] 18. An isolated monoclonal antibody or antigen binding fragment thereof that binds interleukin-23 receptor (IL-23R) comprising a VL comprising CDR sequences of an LCDR1 SEQ ID NO: 1258, an LCDR2 SEQ ID NO:1259, and an LCDR3 SEQ ID NO:1260 and a VH comprising CDR sequences selected from:
[1277] a. an HCDR1 SEQ ID NO:930, an HCDR2 SEQ ID NO:931, and an HCDR3 SEQ ID NO:932; and
[1278] b. an HCDR1 SEQ ID NO:954, an HCDR2 SEQ ID NO:955, and an HCDR3 SEQ ID NO:956.

[1279] 19. The isolated monoclonal antibody or antigen binding fragment thereof of aspect 18 comprising a VL comprising CDR sequences of an LCDR1 SEQ ID NO:1258, an LCDR2 SEQ ID NO:1259, and an LCDR3 SEQ ID NO: 1260 or VL having the amino acid sequence SEQ ID NO:1249; and a VH sequence selected from SEQ ID NO:796 and 804.

[1280] 20. An isolated monoclonal antibody or antigen binding fragment thereof that binds interleukin-23 receptor (IL-23R) comprising a VL comprising CDR sequences of an LCDR1 SEQ ID NO: 1261, an LCDR2 SEQ ID NO:1262, and an LCDR3 SEQ ID NO:1263 and a VH comprising CDR sequences selected from:
[1281] a. an HCDR1 SEQ ID NO:960, an HCDR2 SEQ ID NO:961, and an HCDR3 SEQ ID NO:962; and
[1282] b. an HCDR1 SEQ ID NO:1182, an HCDR2 SEQ ID NO:1183, and an HCDR3 SEQ ID NO:1184.

[1283] 21. The isolated monoclonal antibody or antigen binding fragment thereof of aspect 20 comprising a VL comprising CDR sequences of an LCDR1 SEQ ID NO:1261, an LCDR2 SEQ ID NO: 1262, and an LCDR3 SEQ ID NO: 1263 or having the amino acid sequence SEQ ID NO:1250 and
[1284] a VH sequence selected from SEQ ID NO:806 and 880.

[1285] 22. An isolated monoclonal antibody or antigen binding fragment thereof that binds interleukin-23 receptor (IL-23R) comprising a VL comprising CDR sequences of an LCDR1 SEQ ID NO: 1264, an LCDR2 SEQ ID NO:1265, and an LCDR3 SEQ ID NO:1266 and a VH comprising CDR sequences selected from:
[1286] a. an HCDR1 SEQ ID NO:1008, an HCDR2 SEQ ID NO:1009, and an HCDR3 SEQ ID NO:1010;
[1287] b. an HCDR1 SEQ ID NO: 1020, an HCDR2 SEQ ID NO:1021, and an HCDR3 SEQ ID NO: 1022;
[1288] c. an HCDR1 SEQ ID NO:1038, an HCDR2 SEQ ID NO:1039, and an HCDR3 SEQ ID NO: 1040;
[1289] d. an HCDR1 SEQ ID NO: 1074, an HCDR2 SEQ ID NO: 1075, and an HCDR3 SEQ ID NO: 1076;
[1290] e. an HCDR1 SEQ ID NO:1086, an HCDR2 SEQ ID NO:1087, and an HCDR3 SEQ ID NO: 1088;
[1291] f. an HCDR1 SEQ ID NO: 1104, an HCDR2 SEQ ID NO: 1105, and an HCDR3 SEQ ID NO:1106;
[1292] g. an HCDR1 SEQ ID NO: 1128, an HCDR2 SEQ ID NO: 1129, and an HCDR3 SEQ ID NO:1130; and
[1293] h. an HCDR1 SEQ ID NO:1134, an HCDR2 SEQ ID NO:1135, and an HCDR3 SEQ ID NO:1136.

[1294] 23. The isolated monoclonal antibody or antigen binding fragment thereof of aspect 22 comprising a VL comprising CDR sequences of an LCDR1 SEQ ID NO:1264, an LCDR2 SEQ ID NO:1265, and an LCDR3 SEQ ID NO: 1266 or VL having the amino acid sequence SEQ ID NO:1251; and a VH sequence selected from SEQ ID NO: 806 and 880 822, 826, 832, 844, 848, 854, 862 and 864.

[1295] 24. A VHH antibody or nanobody that binds interleukin-23 receptor (IL-23R) comprising a VH sequence selected from SEQ ID NO:786, 788, 790, 792, 800, 802, 824, 828, 870, 794, 820, 830, 834, 836, 838, 840, 842, 846, 850, 852, 856, 860, 866, 868, 872, 796, 804, 806, 880, 822, 826, 832, 844, 848, 854, 862 and 864.

[1296] 25. An isolated monoclonal antibody or antigen binding fragment thereof that binds interleukin-23 receptor (IL-23R) comprising:
[1297] a. an HCDR1, an HCDR2, and an HCDR3 as set forth in SEQ ID NO: 138, and an LCDR1, an LCDR2, and an LCDR3 as set forth in SEQ ID NO:139;
[1298] b. an HCDR1, an HCDR2, and an HCDR3 as set forth in SEQ ID NO: 142, and an LCDR1, an LCDR2, and an LCDR3 as set forth in SEQ ID NO:143;
[1299] c. an HCDR1, an HCDR2, and an HCDR3 as set forth in SEQ ID NO: 144, and an LCDR1, an LCDR2, and an LCDR3 as set forth in SEQ ID NO:145;
[1300] d. an HCDR1, an HCDR2, and an HCDR3 as set forth in SEQ ID NO: 148, and an LCDR1, an LCDR2, and an LCDR3 as set forth in SEQ ID NO:149;
[1301] e. an HCDR1, an HCDR2, and an HCDR3 as set forth in SEQ ID NO: 150, and an LCDR1, an LCDR2, and an LCDR3 as set forth in SEQ ID NO:151;
[1302] f. an HCDR1, an HCDR2, and an HCDR3 as set forth in SEQ ID NO: 152, and an LCDR1, an LCDR2, and an LCDR3 as set forth in SEQ ID NO:153;
[1303] g. an HCDR1, an HCDR2, and an HCDR3 as set forth in SEQ ID NO: 154, and an LCDR1, an LCDR2, and an LCDR3 as set forth in SEQ ID NO:155;
[1304] h. an HCDR1, an HCDR2, and an HCDR3 as set forth in SEQ ID NO: 156, and an LCDR1, an LCDR2, and an LCDR3 as set forth in SEQ ID NO:157;
[1305] i. an HCDR1, an HCDR2, and an HCDR3 as set forth in SEQ ID NO: 158, and an LCDR1, an LCDR2, and an LCDR3 as set forth in SEQ ID NO:159;
[1306] j. an HCDR1, an HCDR2, and an HCDR3 as set forth in SEQ ID NO: 160, and an LCDR1, an LCDR2, and an LCDR3 as set forth in SEQ ID NO:161;
[1307] k. an HCDR1, an HCDR2, and an HCDR3 as set forth in SEQ ID NO: 162, and an LCDR1, an LCDR2, and an LCDR3 as set forth in SEQ ID NO:163;
[1308] l. an HCDR1, an HCDR2, and an HCDR3 as set forth in SEQ ID NO: 164, and an LCDR1, an LCDR2, and an LCDR3 as set forth in SEQ ID NO:165;
[1309] m. an HCDR1, an HCDR2, and an HCDR3 as set forth in SEQ ID NO: 166, and an LCDR1, an LCDR2, and an LCDR3 as set forth in SEQ ID NO:167;
[1310] n. an HCDR1, an HCDR2, and an HCDR3 as set forth in SEQ ID NO: 168, and an LCDR1, an LCDR2, and an LCDR3 as set forth in SEQ ID NO:169;
[1311] o. an HCDR1, an HCDR2, and an HCDR3 as set forth in SEQ ID NO: 170, and an LCDR1, an LCDR2, and an LCDR3 as set forth in SEQ ID NO:171;
[1312] p. an HCDR1, an HCDR2, and an HCDR3 as set forth in SEQ ID NO: 172, and an LCDR1, an LCDR2, and an LCDR3 as set forth in SEQ ID NO:173;
[1313] q. an HCDR1, an HCDR2, and an HCDR3 as set forth in SEQ ID NO: 174, and an LCDR1, an LCDR2, and an LCDR3 as set forth in SEQ ID NO:175;
[1314] r. an HCDR1, an HCDR2, and an HCDR3 as set forth in SEQ ID NO: 176, and an LCDR1, an LCDR2, and an LCDR3 as set forth in SEQ ID NO:177;
[1315] s. an HCDR1, an HCDR2, and an HCDR3 as set forth in SEQ ID NO: 178, and an LCDR1, an LCDR2, and an LCDR3 as set forth in SEQ ID NO:179;
[1316] t. an HCDR1, an HCDR2, and an HCDR3 as set forth in SEQ ID NO: 180, and an LCDR1, an LCDR2, and an LCDR3 as set forth in SEQ ID NO:181;
[1317] u. an HCDR1, an HCDR2, and an HCDR3 as set forth in SEQ ID NO: 182, and an LCDR1, an LCDR2, and an LCDR3 as set forth in SEQ ID NO:183;
[1318] v. an HCDR1, an HCDR2, and an HCDR3 as set forth in SEQ ID NO: 186, and an LCDR1, an LCDR2, and an LCDR3 as set forth in SEQ ID NO:187;
[1319] w. an HCDR1, an HCDR2, and an HCDR3 as set forth in SEQ ID NO: 188, and an LCDR1, an LCDR2, and an LCDR3 as set forth in SEQ ID NO:189;
[1320] x. an HCDR1, an HCDR2, and an HCDR3 as set forth in SEQ ID NO: 190, and an LCDR1, an LCDR2, and an LCDR3 as set forth in SEQ ID NO:191;
[1321] y. an HCDR1, an HCDR2, and an HCDR3 as set forth in SEQ ID NO: 192, and an LCDR1, an LCDR2, and an LCDR3 as set forth in SEQ ID NO:193;
[1322] z. an HCDR1, an HCDR2, and an HCDR3 as set forth in SEQ ID NO: 194, and an LCDR1, an LCDR2, and an LCDR3 as set forth in SEQ ID NO:195;
[1323] aa. an HCDR1, an HCDR2, and an HCDR3 as set forth in SEQ ID NO: 196, and an LCDR1, an LCDR2, and an LCDR3 as set forth in SEQ ID NO:197;
[1324] bb. an HCDR1, an HCDR2, and an HCDR3 as set forth in SEQ ID NO: 198, and an LCDR1, an LCDR2, and an LCDR3 as set forth in SEQ ID NO:199;
[1325] cc. an HCDR1, an HCDR2, and an HCDR3 as set forth in SEQ ID NO:200, and an LCDR1, an LCDR2, and an LCDR3 as set forth in SEQ ID NO:201;
[1326] dd. an HCDR1, an HCDR2, and an HCDR3 as set forth in SEQ ID NO:202, and an LCDR1, an LCDR2, and an LCDR3 as set forth in SEQ ID NO:203;
[1327] ee. an HCDR1, an HCDR2, and an HCDR3 as set forth in SEQ ID NO:204, and an LCDR1, an LCDR2, and an LCDR3 as set forth in SEQ ID NO:205;
[1328] ff. an HCDR1, an HCDR2, and an HCDR3 as set forth in SEQ ID NO:206, and an LCDR1, an LCDR2, and an LCDR3 as set forth in SEQ ID NO:207;
[1329] gg. an HCDR1, an HCDR2, and an HCDR3 as set forth in SEQ ID NO:208, and an LCDR1, an LCDR2, and an LCDR3 as set forth in SEQ ID NO:209;
[1330] hh. an HCDR1, an HCDR2, and an HCDR3 as set forth in SEQ ID NO:210, and an LCDR1, an LCDR2, and an LCDR3 as set forth in SEQ ID NO:211;
[1331] ii. an HCDR1, an HCDR2, and an HCDR3 as set forth in SEQ ID NO:212, and an LCDR1, an LCDR2, and an LCDR3 as set forth in SEQ ID NO:213;
[1332] jj. an HCDR1, an HCDR2, and an HCDR3 as set forth in SEQ ID NO:214, and an LCDR1, an LCDR2, and an LCDR3 as set forth in SEQ ID NO:215;
[1333] kk. an HCDR1, an HCDR2, and an HCDR3 as set forth in SEQ ID NO:216, and an LCDR1, an LCDR2, and an LCDR3 as set forth in SEQ ID NO:217;
[1334] ll. an HCDR1, an HCDR2, and an HCDR3 as set forth in SEQ ID NO:218, and an LCDR1, an LCDR2, and an LCDR3 as set forth in SEQ ID NO:219;
[1335] mm. an HCDR1, an HCDR2, and an HCDR3 as set forth in SEQ ID NO:220, and an LCDR1, an LCDR2, and an LCDR3 as set forth in SEQ ID NO:221;
[1336] nn. an HCDR1, an HCDR2, and an HCDR3 as set forth in SEQ ID NO:222, and an LCDR1, an LCDR2, and an LCDR3 as set forth in SEQ ID NO:223;
[1337] oo. an HCDR1, an HCDR2, and an HCDR3 as set forth in SEQ ID NO:226, and an LCDR1, an LCDR2, and an LCDR3 as set forth in SEQ ID NO:227;
[1338] pp. an HCDR1, an HCDR2, and an HCDR3 as set forth in SEQ ID NO:228, and an LCDR1, an LCDR2, and an LCDR3 as set forth in SEQ ID NO:229;
[1339] qq. an HCDR1, an HCDR2, and an HCDR3 as set forth in SEQ ID NO:230, and an LCDR1, an LCDR2, and an LCDR3 as set forth in SEQ ID NO:231;
[1340] rr. an HCDR1, an HCDR2, and an HCDR3 as set forth in SEQ ID NO:232, and an LCDR1, an LCDR2, and an LCDR3 as set forth in SEQ ID NO:233;
[1341] ss. an HCDR1, an HCDR2, and an HCDR3 as set forth in SEQ ID NO:234, and an LCDR1, an LCDR2, and an LCDR3 as set forth in SEQ ID NO:235;
[1342] tt. an HCDR1, an HCDR2, and an HCDR3 as set forth in SEQ ID NO:236, and an LCDR1, an LCDR2, and an LCDR3 as set forth in SEQ ID NO:237;
[1343] uu. an HCDR1, an HCDR2, and an HCDR3 as set forth in SEQ ID NO:238, and an LCDR1, an LCDR2, and an LCDR3 as set forth in SEQ ID NO:239;
[1344] vv. an HCDR1, an HCDR2, and an HCDR3 as set forth in SEQ ID NO:240, and an LCDR1, an LCDR2, and an LCDR3 as set forth in SEQ ID NO:241;
[1345] ww. an HCDR1, an HCDR2, and an HCDR3 as set forth in SEQ ID NO:246, and an LCDR1, an LCDR2, and an LCDR3 as set forth in SEQ ID NO:247;
[1346] xx. an HCDR1, an HCDR2, and an HCDR3 as set forth in SEQ ID NO:248, and an LCDR1, an LCDR2, and an LCDR3 as set forth in SEQ ID NO:249;
[1347] yy. an HCDR1, an HCDR2, and an HCDR3 as set forth in SEQ ID NO:250, and an LCDR1, an LCDR2, and an LCDR3 as set forth in SEQ ID NO:251;
[1348] zz. an HCDR1, an HCDR2, and an HCDR3 as set forth in SEQ ID NO:252, and an LCDR1, an LCDR2, and an LCDR3 as set forth in SEQ ID NO:253;
[1349] aaa. an HCDR1, an HCDR2, and an HCDR3 as set forth in SEQ ID NO:254, and an LCDR1, an LCDR2, and an LCDR3 as set forth in SEQ ID NO:255;
[1350] bbb. an HCDR1, an HCDR2, and an HCDR3 as set forth in SEQ ID NO:256, and an LCDR1, an LCDR2, and an LCDR3 as set forth in SEQ ID NO:257;
[1351] ccc. an HCDR1, an HCDR2, and an HCDR3 as set forth in SEQ ID NO:258, and an LCDR1, an LCDR2, and an LCDR3 as set forth in SEQ ID NO:259;
[1352] ddd. an HCDR1, an HCDR2, and an HCDR3 as set forth in SEQ ID NO:260, and an LCDR1, an LCDR2, and an LCDR3 as set forth in SEQ ID NO:261;
[1353] eee. an HCDR1, an HCDR2, and an HCDR3 as set forth in SEQ ID NO:262, and a LCDR1, an LCDR2, and an LCDR3 as set forth in SEQ ID NO:263;
[1354] fff. an HCDR1, an HCDR2, and an HCDR3 as set forth in SEQ ID NO:264, and an LCDR1, an LCDR2, and an LCDR3 as set forth in SEQ ID NO:265;
[1355] ggg. an HCDR1, an HCDR2, and an HCDR3 as set forth in SEQ ID NO:268, and an LCDR1, an LCDR2, and an LCDR3 as set forth in SEQ ID NO:269;
[1356] hhh. an HCDR1, an HCDR2, and an HCDR3 as set forth in SEQ ID NO:786, and an LCDR1, an LCDR2, and an LCDR3 as set forth in SEQ ID NO:787;
[1357] iii. an HCDR1, an HCDR2, and an HCDR3 as set forth in SEQ ID NO:788, and an LCDR1, an LCDR2, and an LCDR3 as set forth in SEQ ID NO:789;
[1358] jjj. an HCDR1, an HCDR2, and an HCDR3 as set forth in SEQ ID NO:790, and an LCDR1, an LCDR2, and an LCDR3 as set forth in SEQ ID NO:791;
[1359] kkk. an HCDR1, an HCDR2, and an HCDR3 as set forth in SEQ ID NO:792, and an LCDR1, an LCDR2, and an LCDR3 as set forth in SEQ ID NO:793;
[1360] lll. an HCDR1, an HCDR2, and an HCDR3 as set forth in SEQ ID NO:798, and an LCDR1, an LCDR2, and an LCDR3 as set forth in SEQ ID NO:799;
[1361] mmm. an HCDR1, an HCDR2, and an HCDR3 as set forth in SEQ ID NO:806, and an LCDR1, an LCDR2, and an LCDR3 as set forth in SEQ ID NO:807;
[1362] nnn. an HCDR1, an HCDR2, and an HCDR3 as set forth in SEQ ID NO:808, and an LCDR1, an LCDR2, and an LCDR3 as set forth in SEQ ID NO:809;
[1363] ooo. an HCDR1, an HCDR2, and an HCDR3 as set forth in SEQ ID NO:810, and an LCDR1, an LCDR2, and an LCDR3 as set forth in SEQ ID NO:811;
[1364] ppp. an HCDR1, an HCDR2, and an HCDR3 as set forth in SEQ ID NO:812, and an LCDR1, an LCDR2, and an LCDR3 as set forth in SEQ ID NO:813;
[1365] qqq. an HCDR1, an HCDR2, and an HCDR3 as set forth in SEQ ID NO:814, and an LCDR1, an LCDR2, and an LCDR3 as set forth in SEQ ID NO:815;
[1366] rrr. an HCDR1, an HCDR2, and an HCDR3 as set forth in SEQ ID NO:816, and an LCDR1, an LCDR2, and an LCDR3 as set forth in SEQ ID NO:817;
[1367] sss. an HCDR1, an HCDR2, and an HCDR3 as set forth in SEQ ID NO:818, and an LCDR1, an LCDR2, and an LCDR3 as set forth in SEQ ID NO:819;
[1368] ttt. an HCDR1, an HCDR2, and an HCDR3 as set forth in SEQ ID NO:820, and an LCDR1, an LCDR2, and an LCDR3 as set forth in SEQ ID NO:821;
[1369] uuu. an HCDR1, an HCDR2, and an HCDR3 as set forth in SEQ ID NO:822, and an LCDR1, an LCDR2, and an LCDR3 as set forth in SEQ ID NO:823;
[1370] vvv. an HCDR1, an HCDR2, and an HCDR3 as set forth in SEQ ID NO:824, and an LCDR1, an LCDR2, and an LCDR3 as set forth in SEQ ID NO:825;
[1371] www.an HCDR1, an HCDR2, and an HCDR3 as set forth in SEQ ID NO:826, and an LCDR1, an LCDR2, and an LCDR3 as set forth in SEQ ID NO:827;
[1372] xxx. an HCDR1, an HCDR2, and an HCDR3 as set forth in SEQ ID NO:828, and an LCDR1, an LCDR2, and an LCDR3 as set forth in SEQ ID NO:829;
[1373] yyy. an HCDR1, an HCDR2, and an HCDR3 as set forth in SEQ ID NO:830, and an LCDR1, an LCDR2, and an LCDR3 as set forth in SEQ ID NO:831;
[1374] zzz. an HCDR1, an HCDR2, and an HCDR3 as set forth in SEQ ID NO:832, and an LCDR1, an LCDR2, and an LCDR3 as set forth in SEQ ID NO:833;
[1375] aaaa. an HCDR1, an HCDR2, and an HCDR3 as set forth in SEQ ID NO:836, and an LCDR1, an LCDR2, and an LCDR3 as set forth in SEQ ID NO:837;
[1376] bbbb. an HCDR1, an HCDR2, and an HCDR3 as set forth in SEQ ID NO:838, and an LCDR1, an LCDR2, and an LCDR3 as set forth in SEQ ID NO:839;
[1377] cccc. an HCDR1, an HCDR2, and an HCDR3 as set forth in SEQ ID NO:840, and an LCDR1, an LCDR2, and an LCDR3 as set forth in SEQ ID NO:841;
[1378] dddd. an HCDR1, an HCDR2, and an HCDR3 as set forth in SEQ ID NO: 842, and an LCDR1, an LCDR2, and an LCDR3 as set forth in SEQ ID NO:843;
[1379] eeee. an HCDR1, an HCDR2, and an HCDR3 as set forth in SEQ ID NO:846, and an LCDR1, an LCDR2, and an LCDR3 as set forth in SEQ ID NO:847;
[1380] ffff. an HCDR1, an HCDR2, and an HCDR3 as set forth in SEQ ID NO:848, and an LCDR1, an LCDR2, and an LCDR3 as set forth in SEQ ID NO:849;
[1381] gggg. an HCDR1, an HCDR2, and an HCDR3 as set forth in SEQ ID NO:850, and an LCDR1, an LCDR2, and an LCDR3 as set forth in SEQ ID NO:851;
[1382] hhhh. an HCDR1, an HCDR2, and an HCDR3 as set forth in SEQ ID NO:852, and an LCDR1, an LCDR2, and an LCDR3 as set forth in SEQ ID NO:853;
[1383] iiii. an HCDR1, an HCDR2, and an HCDR3 as set forth in SEQ ID NO:854, and an LCDR1, an LCDR2, and an LCDR3 as set forth in SEQ ID NO:855;
[1384] jjjj. an HCDR1, an HCDR2, and an HCDR3 as set forth in SEQ ID NO:856, and an LCDR1, an LCDR2, and an LCDR3 as set forth in SEQ ID NO:857;
[1385] kkkk. an HCDR1, an HCDR2, and an HCDR3 as set forth in SEQ ID NO:858, and an LCDR1, an LCDR2, and an LCDR3 as set forth in SEQ ID NO:859;
[1386] llll. an HCDR1, an HCDR2, and an HCDR3 as set forth in SEQ ID NO:860, and an LCDR1, an LCDR2, and an LCDR3 as set forth in SEQ ID NO:861;
[1387] mmmm. an HCDR1, an HCDR2, and an HCDR3 as set forth in SEQ ID NO:862, and an LCDR1, an LCDR2, and an LCDR3 as set forth in SEQ ID NO:863;
[1388] nnnn. an HCDR1, an HCDR2, and an HCDR3 as set forth in SEQ ID NO:864, and an LCDR1, an LCDR2, and an LCDR3 as set forth in SEQ ID NO:865;
[1389] oooo. an HCDR1, an HCDR2, and an HCDR3 as set forth in SEQ ID NO:866, and an LCDR1, an LCDR2, and an LCDR3 as set forth in SEQ ID NO:867;
[1390] pppp. an HCDR1, an HCDR2, and an HCDR3 as set forth in SEQ ID NO:868, and an LCDR1, an LCDR2, and an LCDR3 as set forth in SEQ ID NO:869;
[1391] qqqq. an HCDR1, an HCDR2, and an HCDR3 as set forth in SEQ ID NO:870, and an LCDR1, an LCDR2, and an LCDR3 as set forth in SEQ ID NO:871;
[1392] rrrr. an HCDR1, an HCDR2, and an HCDR3 as set forth in SEQ ID NO:872, and an LCDR1, an LCDR2, and an LCDR3 as set forth in SEQ ID NO:873;
[1393] ssss. an HCDR1, an HCDR2, and an HCDR3 as set forth in SEQ ID NO:874, and an LCDR1, an LCDR2, and an LCDR3 as set forth in SEQ ID NO:875;
[1394] tttt. an HCDR1, an HCDR2, and an HCDR3 as set forth in SEQ ID NO:876, and an LCDR1, an LCDR2, and an LCDR3 as set forth in SEQ ID NO:877;
[1395] uuuu. an HCDR1, an HCDR2, and an HCDR3 as set forth in SEQ ID NO:878, and an LCDR1, an LCDR2, and an LCDR3 as set forth in SEQ ID NO:879;
[1396] vvvv. an HCDR1, an HCDR2, and an HCDR3 as set forth in SEQ ID NO:880, and an LCDR1, an LCDR2, and an LCDR3 as set forth in SEQ ID NO:881;
[1397] wwww. an HCDR1, an HCDR2, and an HCDR3 as set forth in SEQ ID NO:882, and an LCDR1, an LCDR2, and an LCDR3 as set forth in SEQ ID NO:883;
[1398] xxxx. an HCDR1, an HCDR2, and an HCDR3 as set forth in SEQ ID NO:884, and an LCDR1, an LCDR2, and an LCDR3 as set forth in SEQ ID NO:885;
[1399] yyyy. an HCDR1, an HCDR2, and an HCDR3 as set forth in SEQ ID NO:886, and an LCDR1, an LCDR2, and an LCDR3 as set forth in SEQ ID NO:887;
[1400] zzzz. an HCDR1, an HCDR2, and an HCDR3 as set forth in SEQ ID NO:888, and an LCDR1, an LCDR2, and an LCDR3 as set forth in SEQ ID NO:889; or
[1401] aaaaa. an HCDR1, an HCDR2, and an HCDR3 as set forth in SEQ ID NO:890, and an LCDR1, an LCDR2, and an LCDR3 as set forth in SEQ ID NO:891.

[1402] 26. An isolated monoclonal antibody or antigen binding fragment thereof that binds interleukin-23 receptor (IL-23R) comprising:
[1403] a. a VH comprising an HCDR1, an HCDR2, and an HCDR3 having an amino acid sequence of SEQ ID NOs:276, 277, and 278, respectively, and a VL comprising an LCDR1, an LCDR2, and an LCDR3 having an amino acid sequence of SEQ ID NOs:279, 280, and 281, respectively;
[1404] b. a VH comprising an HCDR1, an HCDR2, and an HCDR3 having an amino acid sequence of SEQ ID NOs:288, 289, and 290, respectively, and a VL comprising an LCDR1, an LCDR2, and an LCDR3 having an amino acid sequence of SEQ ID NOs:291, 292, and 293, respectively;
[1405] c. a VH comprising an HCDR1, an HCDR2, and an HCDR3 having an amino acid sequence of SEQ ID NOs:294, 295, and 296, respectively, and a VL comprising an LCDR1, an LCDR2, and an LCDR3 having an amino acid sequence of SEQ ID NOs:297, 298, and 299, respectively;
[1406] d. a VH comprising an HCDR1, an HCDR2, and an HCDR3 having an amino acid sequence of SEQ ID NOs:306, 307, and 308, respectively, and a VL comprising an LCDR1, an LCDR2, and an LCDR3 having an amino acid sequence of SEQ ID NOs:309, 310, and 311, respectively;
[1407] e. a VH comprising an HCDR1, an HCDR2, and an HCDR3 having an amino acid sequence of SEQ ID NOs:312, 313, and 314, respectively, and a VL comprising an LCDR1, an LCDR2, and an LCDR3 having an amino acid sequence of SEQ ID NOs:315, 316, and 317,
[1408] f. a VH comprising an HCDR1, an HCDR2, and an HCDR3 having an amino acid sequence of SEQ ID NOs:318, 319, and 320, respectively, and a VL comprising an LCDR1, an LCDR2, and an LCDR3 having an amino acid sequence of SEQ ID NOs:321, 322, and 323, respectively;
[1409] g. a VH comprising an HCDR1, an HCDR2, and an HCDR3 having an amino acid sequence of SEQ ID NOs:324, 325, and 326, respectively, and a VL comprising an LCDR1, an LCDR2, and an LCDR3 having an amino acid sequence of SEQ ID NOs:327, 328, and 329, respectively;
[1410] h. a VH comprising an HCDR1, an HCDR2, and an HCDR3 having an amino acid sequence of SEQ ID NOs:330, 331, and 332, respectively, and a VL comprising an LCDR1, an LCDR2, and an LCDR3 having an amino acid sequence of SEQ ID NOs:333, 334, and 335, respectively;
[1411] i. a VH comprising an HCDR1, an HCDR2, and an HCDR3 having an amino acid sequence of SEQ ID NOs:336, 337, and 338, respectively, and a VL comprising an LCDR1, an LCDR2, and an LCDR3 having an amino acid sequence of SEQ ID NOs:339, 340, and 341, respectively;
[1412] j. a VH comprising an HCDR1, an HCDR2, and an HCDR3 having an amino acid sequence of SEQ ID NOs:342, 343, and 344, respectively, and a VL comprising an LCDR1, an LCDR2, and an LCDR3 having an amino acid sequence of SEQ ID NOs:345, 346, and 347, respectively;
[1413] k. a VH comprising an HCDR1, an HCDR2, and an HCDR3 having an amino acid sequence of SEQ ID NOs:348, 349, and 350, respectively, and a VL comprising an LCDR1, an LCDR2, and an LCDR3 having an amino acid sequence of SEQ ID NOs:351, 352, and 353, respectively;
[1414] l. a VH comprising an HCDR1, an HCDR2, and an HCDR3 having an amino acid sequence of SEQ ID NOs:354, 355, and 356, respectively, and a VL comprising an LCDR1, an LCDR2, and an LCDR3 having an amino acid sequence of SEQ ID NOs:357, 358, and 359, respectively;
[1415] m. a VH comprising an HCDR1, an HCDR2, and an HCDR3 having an amino acid sequence of SEQ ID NOs:360, 361, and 362, respectively, and a VL comprising an LCDR1, an LCDR2, and an LCDR3 having an amino acid sequence of SEQ ID NOs:363, 364, and 365, respectively;
[1416] n. a VH comprising an HCDR1, an HCDR2, and an HCDR3 having an amino acid sequence of SEQ ID NOs:366, 367, and 368, respectively, and a VL comprising an LCDR1, an LCDR2, and an LCDR3 having an amino acid sequence of SEQ ID NOs:369, 370, and 371,
[1417] o. a VH comprising an HCDR1, an HCDR2, and an HCDR3 having an amino acid sequence of SEQ ID NOs:372, 373, and 374, respectively, and a VL comprising an LCDR1, an LCDR2, and an LCDR3 having an amino acid sequence of SEQ ID NOs:375, 376, and 377, respectively;
[1418] p. a VH comprising an HCDR1, an HCDR2, and an HCDR3 having an amino acid sequence of SEQ ID NOs:378, 379, and 380, respectively, and a VL comprising an LCDR1, an LCDR2, and an LCDR3 having an amino acid sequence of SEQ ID NOs:381, 382, and 383, respectively;
[1419] q. a VH comprising an HCDR1, an HCDR2, and an HCDR3 having an amino acid sequence of SEQ ID NOs:384, 385, and 386, respectively, and a VL comprising an LCDR1, an LCDR2, and an LCDR3 having an amino acid sequence of SEQ ID NOs:387, 388, and 389, respectively;
[1420] r. a VH comprising an HCDR1, an HCDR2, and an HCDR3 having an amino acid sequence of SEQ ID NOs:390, 391, and 392, respectively, and a VL comprising an LCDR1, an LCDR2, and an LCDR3 having an amino acid sequence of SEQ ID NOs:393, 394, and 395, respectively;
[1421] s. a VH comprising an HCDR1, an HCDR2, and an HCDR3 having an amino acid sequence of SEQ ID NOs:396, 397, and 398, respectively, and a VL comprising an LCDR1, an LCDR2, and an LCDR3 having an amino acid sequence of SEQ ID NOs:399, 400, and 401, respectively;
[1422] t. a VH comprising an HCDR1, an HCDR2, and an HCDR3 having an amino acid sequence of SEQ ID NOs:402, 403, and 404, respectively, and a VL comprising an LCDR1, an LCDR2, and an LCDR3 having an amino acid sequence of SEQ ID NOs:405, 406, and 407, respectively;
[1423] u. a VH comprising an HCDR1, an HCDR2, and an HCDR3 having an amino acid sequence of SEQ ID NOs:408, 409, and 410, respectively, and a VL comprising an LCDR1, an LCDR2, and an LCDR3 having an amino acid sequence of SEQ ID NOs:411, 412, and 413, respectively;
[1424] v. a VH comprising an HCDR1, an HCDR2, and an HCDR3 having an amino acid sequence of SEQ ID NOs:420, 421, and 422, respectively, and a VL comprising an LCDR1, an LCDR2, and an LCDR3 having an amino acid sequence of SEQ ID NOs:423, 424, and 425, respectively;
[1425] w. a VH comprising an HCDR1, an HCDR2, and an HCDR3 having an amino acid sequence of SEQ ID NOs:426, 427, and 428, respectively, and a VL comprising an LCDR1, an LCDR2, and an LCDR3 having an amino acid sequence of SEQ ID NOs:429, 430, and 431,
[1426] x. a VH comprising an HCDR1, an HCDR2, and an HCDR3 having an amino acid sequence of SEQ ID NOs:432, 433, and 434, respectively, and a VL comprising an LCDR1, an LCDR2, and an LCDR3 having an amino acid sequence of SEQ ID NOs:435, 436, and 437, respectively;
[1427] y. a VH comprising an HCDR1, an HCDR2, and an HCDR3 having an amino acid sequence of SEQ ID NOs:438, 439, and 440, respectively, and a VL comprising an LCDR1, an LCDR2, and an LCDR3 having an amino acid sequence of SEQ ID NOs:441, 442, and 443, respectively;
[1428] z. a VH comprising an HCDR1, an HCDR2, and an HCDR3 having an amino acid sequence of SEQ ID NOs:444, 445, and 446, respectively, and a VL comprising an LCDR1, an LCDR2, and an LCDR3 having an amino acid sequence of SEQ ID NOs:447, 448, and 449, respectively;
[1429] aa. a VH comprising an HCDR1, an HCDR2, and an HCDR3 having an amino acid sequence of SEQ ID NOs:450, 451, and 452, respectively, and a VL comprising an LCDR1, an LCDR2, and an LCDR3 having an amino acid sequence of SEQ ID NOs:453, 454, and 455, respectively;
[1430] bb. a VH comprising an HCDR1, an HCDR2, and an HCDR3 having an amino acid sequence of SEQ ID NOs:456, 457, and 458, respectively, and a VL comprising an LCDR1, an LCDR2, and an LCDR3 having an amino acid sequence of SEQ ID NOs:459, 460, and 461, respectively;
[1431] cc. a VH comprising an HCDR1, an HCDR2, and an HCDR3 having an amino acid sequence of SEQ ID NOs:462, 463, and 464, respectively, and a VL comprising an LCDR1, an LCDR2, and an LCDR3 having an amino acid sequence of SEQ ID NOs:465, 466, and 467, respectively;
[1432] dd. a VH comprising an HCDR1, an HCDR2, and an HCDR3 having an amino acid sequence of SEQ ID NOs:468, 469, and 470, respectively, and a VL comprising an LCDR1, an LCDR2, and an LCDR3 having an amino acid sequence of SEQ ID NOs:471, 472, and 473, respectively;
[1433] ee. a VH comprising an HCDR1, an HCDR2, and an HCDR3 having an amino acid sequence of SEQ ID NOs:474, 475, and 476, respectively, and a VL comprising an LCDR1, an LCDR2, and an LCDR3 having an amino acid sequence of SEQ ID NOs:477, 478, and 479, respectively;
[1434] ff. a VH comprising an HCDR1, an HCDR2, and an HCDR3 having an amino acid sequence of SEQ ID NOs:480, 481, and 482, respectively, and a VL comprising an LCDR1, an LCDR2, and an LCDR3 having an amino acid sequence of SEQ ID NOs:483, 484, and 485,
[1435] gg. a VH comprising an HCDR1, an HCDR2, and an HCDR3 having an amino acid sequence of SEQ ID NOs:486, 487, and 488, respectively, and a VL comprising an LCDR1, an LCDR2, and an LCDR3 having an amino acid sequence of SEQ ID NOs:489, 490, and 491, respectively;
[1436] hh. a VH comprising an HCDR1, an HCDR2, and an HCDR3 having an amino acid sequence of SEQ ID NOs:492, 493, and 494, respectively, and a VL comprising an LCDR1, an LCDR2, and an LCDR3 having an amino acid sequence of SEQ ID NOs:495, 496, and 497, respectively;
[1437] ii. a VH comprising an HCDR1, an HCDR2, and an HCDR3 having an amino acid sequence of SEQ ID NOs:498, 499, and 500, respectively, and a VL comprising an LCDR1, an LCDR2, and an LCDR3 having an amino acid sequence of SEQ ID NOs:501, 502, and 503, respectively;
[1438] jj. a VH comprising an HCDR1, an HCDR2, and an HCDR3 having an amino acid sequence of SEQ ID NOs:504, 505, and 506, respectively, and a VL comprising an LCDR1, an LCDR2, and an LCDR3 having an amino acid sequence of SEQ ID NOs:507, 508, and 509, respectively;
[1439] kk. a VH comprising an HCDR1, an HCDR2, and an HCDR3 having an amino acid sequence of SEQ ID NOs:510, 511, and 512, respectively, and a VL comprising an LCDR1, an LCDR2, and an LCDR3 having an amino acid sequence of SEQ ID NOs:513, 514, and 515, respectively;
[1440] ll. a VH comprising an HCDR1, an HCDR2, and an HCDR3 having an amino acid sequence of SEQ ID NOs:516, 517, and 518, respectively, and a VL comprising an LCDR1, an LCDR2, and an LCDR3 having an amino acid sequence of SEQ ID NOs:519, 520, and 521, respectively;
[1441] mm. a VH comprising an HCDR1, an HCDR2, and an HCDR3 having an amino acid sequence of SEQ ID NOs:522, 523, and 524, respectively, and a VL comprising an LCDR1, an LCDR2, and an LCDR3 having an amino acid sequence of SEQ ID NOs:525, 526, and 527, respectively;
[1442] nn. a VH comprising an HCDR1, an HCDR2, and an HCDR3 having an amino acid sequence of SEQ ID NOs:528, 529, and 530, respectively, and a VL comprising an LCDR1, an LCDR2, and an LCDR3 having an amino acid sequence of SEQ ID NOs:531, 532, and 533, respectively;
[1443] oo. a VH comprising an HCDR1, an HCDR2, and an HCDR3 having an amino acid sequence of SEQ ID NOs:540, 541, and 542, respectively, and a VL comprising an LCDR1, an LCDR2, and an LCDR3 having an amino acid sequence of SEQ ID NOs:543, 544, and 545,
[1444] pp. a VH comprising an HCDR1, an HCDR2, and an HCDR3 having an amino acid sequence of SEQ ID NOs:546, 547, and 548, respectively, and a VL comprising an LCDR1, an LCDR2, and an LCDR3 having an amino acid sequence of SEQ ID NOs:549, 550, and 551, respectively;
[1445] qq. a VH comprising an HCDR1, an HCDR2, and an HCDR3 having an amino acid sequence of SEQ ID NOs:552, 553, and 554, respectively, and a VL comprising an LCDR1, an LCDR2, and an LCDR3 having an amino acid sequence of SEQ ID NOs:555, 556, and 557, respectively;
[1446] rr. a VH comprising an HCDR1, an HCDR2, and an HCDR3 having an amino acid sequence of SEQ ID NOs:558, 559, and 560, respectively, and a VL comprising an LCDR1, an LCDR2, and an LCDR3 having an amino acid sequence of SEQ ID NOs:561, 562, and 563, respectively;
[1447] ss. a VH comprising an HCDR1, an HCDR2, and an HCDR3 having an amino acid sequence of SEQ ID NOs:564, 565, and 566, respectively, and a VL comprising an LCDR1, an LCDR2, and an LCDR3 having an amino acid sequence of SEQ ID NOs:567, 568, and 569, respectively;
[1448] tt. a VH comprising an HCDR1, an HCDR2, and an HCDR3 having an amino acid sequence of SEQ ID NOs:570, 571, and 572, respectively, and a VL comprising an LCDR1, an LCDR2, and an LCDR3 having an amino acid sequence of SEQ ID NOs:573, 574, and 575, respectively;
[1449] uu. a VH comprising an HCDR1, an HCDR2, and an HCDR3 having an amino acid sequence of SEQ ID NOs:576, 577, and 578, respectively, and a VL comprising an LCDR1, an LCDR2, and an LCDR3 having an amino acid sequence of SEQ ID NOs:579, 580, and 581, respectively;
[1450] vv. a VH comprising an HCDR1, an HCDR2, and an HCDR3 having an amino acid sequence of SEQ ID NOs:582, 583, and 584, respectively, and a VL comprising an LCDR1, an LCDR2, and an LCDR3 having an amino acid sequence of SEQ ID NOs:585, 586, and 587, respectively;
[1451] ww. a VH comprising an HCDR1, an HCDR2, and an HCDR3 having an amino acid sequence of SEQ ID NOs:600, 601, and 602, respectively, and a VL comprising an LCDR1, an LCDR2, and an LCDR3 having an amino acid sequence of SEQ ID NOs:603, 604, and 605, respectively;
[1452] xx. a VH comprising an HCDR1, an HCDR2, and an HCDR3 having an amino acid sequence of SEQ ID NOs:606, 607, and 608, respectively, and a VL comprising an LCDR1, an LCDR2, and an LCDR3 having an amino acid sequence of SEQ ID NOs:609, 610, and 611,
[1453] yy. a VH comprising an HCDR1, an HCDR2, and an HCDR3 having an amino acid sequence of SEQ ID NOs:612, 613, and 614, respectively, and a VL comprising an LCDR1, an LCDR2, and an LCDR3 having an amino acid sequence of SEQ ID NOs:615, 616, and 617, respectively;
[1454] zz. a VH comprising an HCDR1, an HCDR2, and an HCDR3 having an amino acid sequence of SEQ ID NOs:618, 619, and 620, respectively, and a VL comprising an LCDR1, an LCDR2, and an LCDR3 having an amino acid sequence of SEQ ID NOs:621, 622, and 623, respectively;
[1455] aaa. a VH comprising an HCDR1, an HCDR2, and an HCDR3 having an amino acid sequence of SEQ ID NOs:624, 625, and 626, respectively, and a VL comprising an LCDR1, an LCDR2, and an LCDR3 having an amino acid sequence of SEQ ID NOs:627, 628, and 629, respectively;
[1456] bbb. a VH comprising an HCDR1, an HCDR2, and an HCDR3 having an amino acid sequence of SEQ ID NOs:630, 631, and 632, respectively, and a VL comprising an LCDR1, an LCDR2, and an LCDR3 having an amino acid sequence of SEQ ID NOs:633, 634, and 635, respectively;
[1457] ccc. a VH comprising an HCDR1, an HCDR2, and an HCDR3 having an amino acid sequence of SEQ ID NOs:636, 637, and 638, respectively, and a VL comprising an LCDR1, an LCDR2, and an LCDR3 having an amino acid sequence of SEQ ID NOs:639, 640, and 641, respectively;
[1458] ddd. a VH comprising an HCDR1, an HCDR2, and an HCDR3 having an amino acid sequence of SEQ ID NOs:642, 643, and 644, respectively, and a VL comprising an LCDR1, an LCDR2, and an LCDR3 having an amino acid sequence of SEQ ID NOs:645, 646, and 647, respectively;
[1459] eee. a VH comprising an HCDR1, an HCDR2, and an HCDR3 having an amino acid sequence of SEQ ID NOs:648, 649, and 650, respectively, and a VL comprising an LCDR1, an LCDR2, and an LCDR3 having an amino acid sequence of SEQ ID NOs:651, 652, and 653, respectively;
[1460] fff. a VH comprising an HCDR1, an HCDR2, and an HCDR3 having an amino acid sequence of SEQ ID NOs:654, 655, and 656, respectively, and a VL comprising an LCDR1, an LCDR2, and an LCDR3 having an amino acid sequence of SEQ ID NOs:657, 658, and 659, respectively;
[1461] ggg. a VH comprising an HCDR1, an HCDR2, and an HCDR3 having an amino acid sequence of SEQ ID NOs:666, 667, and 668, respectively, and a VL comprising an LCDR1, an LCDR2, and an LCDR3 having an amino acid sequence of SEQ ID NOs:669, 670, and 671,
[1462] hhh. a VH comprising an HCDR1, an HCDR2, and an HCDR3 having an amino acid sequence of SEQ ID NOs:900, 901, and 902, respectively, and a VL comprising an LCDR1, an LCDR2, and an LCDR3 having an amino acid sequence of SEQ ID NOs:903, 904, and 905, respectively;
[1463] iii. a VH comprising an HCDR1, an HCDR2, and an HCDR3 having an amino acid sequence of SEQ ID NOs:906, 907, and 908, respectively, and a VL comprising an LCDR1, an LCDR2, and an LCDR3 having an amino acid sequence of SEQ ID NOs:909, 910, and 911, respectively;
[1464] jjj. a VH comprising an HCDR1, an HCDR2, and an HCDR3 having an amino acid sequence of SEQ ID NOs:912, 913, and 914, respectively, and a VL comprising an LCDR1, an LCDR2, and an LCDR3 having an amino acid sequence of SEQ ID NOs:915, 916, and 917, respectively;
[1465] kkk. a VH comprising an HCDR1, an HCDR2, and an HCDR3 having an amino acid sequence of SEQ ID NOs:918, 919, and 920, respectively, and a VL comprising an LCDR1, an LCDR2, and an LCDR3 having an amino acid sequence of SEQ ID NOs:921, 922, and 923, respectively;
[1466] lll. a VH comprising an HCDR1, an HCDR2, and an HCDR3 having an amino acid sequence of SEQ ID NOs:936, 937, and 938, respectively, and a VL comprising an LCDR1, an LCDR2, and an LCDR3 having an amino acid sequence of SEQ ID NOs:939, 940, and 941, respectively;
[1467] mmm. a VH comprising an HCDR1, an HCDR2, and an HCDR3 having an amino acid sequence of SEQ ID NOs:960, 961, and 962, respectively, and a VL comprising an LCDR1, an LCDR2, and an LCDR3 having an amino acid sequence of SEQ ID NOs:963, 964, and 965, respectively;
[1468] nnn. a VH comprising an HCDR1, an HCDR2, and an HCDR3 having an amino acid sequence of SEQ ID NOs:966, 967, and 968, respectively, and a VL comprising an LCDR1, an LCDR2, and an LCDR3 having an amino acid sequence of SEQ ID NOs:969, 970, and 971, respectively;
[1469] ooo. a VH comprising an HCDR1, an HCDR2, and an HCDR3 having an amino acid sequence of SEQ ID NOs:972, 973, and 974, respectively, and a VL comprising an LCDR1, an LCDR2, and an LCDR3 having an amino acid sequence of SEQ ID NOs:975, 976, and 977, respectively;
[1470] ppp. a VH comprising an HCDR1, an HCDR2, and an HCDR3 having an amino acid sequence of SEQ ID NOs:978, 979, and 980, respectively, and a VL comprising an LCDR1, an LCDR2, and an LCDR3 having an amino acid sequence of SEQ ID NOs:981, 982, and 983,
[1471] qqq. a VH comprising an HCDR1, an HCDR2, and an HCDR3 having an amino acid sequence of SEQ ID NOs:984, 985, and 986, respectively, and a VL comprising an LCDR1, an LCDR2, and an LCDR3 having an amino acid sequence of SEQ ID NOs:987, 988, and 989, respectively;
[1472] rrr. a VH comprising an HCDR1, an HCDR2, and an HCDR3 having an amino acid sequence of SEQ ID NOs:990, 991, and 992, respectively, and a VL comprising an LCDR1, an LCDR2, and an LCDR3 having an amino acid sequence of SEQ ID NOs:993, 994, and 995, respectively;
[1473] sss. a VH comprising an HCDR1, an HCDR2, and an HCDR3 having an amino acid sequence of SEQ ID NOs:996, 997, and 998, respectively, and a VL comprising an LCDR1, an LCDR2, and an LCDR3 having an amino acid sequence of SEQ ID NOs:999, 1000, and 1001, respectively;
[1474] ttt. a VH comprising an HCDR1, an HCDR2, and an HCDR3 having an amino acid sequence of SEQ ID NOs:1002, 1003, and 1004, respectively, and a VL comprising an LCDR1, an LCDR2, and an LCDR3 having an amino acid sequence of SEQ ID NOs:1005, 1006, and 1007, respectively;
[1475] uuu. a VH comprising an HCDR1, an HCDR2, and an HCDR3 having an amino acid sequence of SEQ ID NOs:1008, 1009, and 1010, respectively, and a VL comprising an LCDR1, an LCDR2, and an LCDR3 having an amino acid sequence of SEQ ID NOs:1011, 1012, and 1013, respectively;
[1476] vvv. a VH comprising an HCDR1, an HCDR2, and an HCDR3 having an amino acid sequence of SEQ ID NOs:1014, 1015, and 1016, respectively, and a VL comprising an LCDR1, an LCDR2, and an LCDR3 having an amino acid sequence of SEQ ID NOs:1017, 1018, and 1019, respectively;
[1477] www. a VH comprising an HCDR1, an HCDR2, and an HCDR3 having an amino acid sequence of SEQ ID NOs:1020, 1021, and 1022, respectively, and a VL comprising an LCDR1, an LCDR2, and an LCDR3 having an amino acid sequence of SEQ ID NOs:1023, 1024, and 1025, respectively;
[1478] xxx. a VH comprising an HCDR1, an HCDR2, and an HCDR3 having an amino acid sequence of SEQ ID NOs:1026, 1027, and 1028, respectively, and a VL comprising an LCDR1, an LCDR2, and an LCDR3 having an amino acid sequence of SEQ ID NOs:1029, 1030, and 1031, respectively;
[1479] yyy. a VH comprising an HCDR1, an HCDR2, and an HCDR3 having an amino acid sequence of SEQ ID NOs:1032, 1033, and 1034, respectively, and a VL comprising an LCDR1, an LCDR2, and an LCDR3 having an amino acid sequence of SEQ ID NOs:1035, 1036, and 1037,
[1480] zzz. a VH comprising an HCDR1, an HCDR2, and an HCDR3 having an amino acid sequence of SEQ ID NOs:1038, 1039, and 1040, respectively, and a VL comprising an LCDR1, an LCDR2, and an LCDR3 having an amino acid sequence of SEQ ID NOs:1041, 1042, and 1043, respectively;
[1481] aaaa. a VH comprising an HCDR1, an HCDR2, and an HCDR3 having an amino acid sequence of SEQ ID NOs: 1050, 1051, and 1052, respectively, and a VL comprising an LCDR1, an LCDR2, and an LCDR3 having an amino acid sequence of SEQ ID NOs:1053, 1054, and 1055, respectively;
[1482] bbbb. a VH comprising an HCDR1, an HCDR2, and an HCDR3 having an amino acid sequence of SEQ ID NOs:1056, 1057, and 1058, respectively, and a VL comprising an LCDR1, an LCDR2, and an LCDR3 having an amino acid sequence of SEQ ID NOs:1059, 1060, and 1061, respectively;
[1483] cccc. a VH comprising an HCDR1, an HCDR2, and an HCDR3 having an amino acid sequence of SEQ ID NOs:1062, 1063, and 1064, respectively, and a VL comprising an LCDR1, an LCDR2, and an LCDR3 having an amino acid sequence of SEQ ID NOs:1065, 1066, and 1067, respectively;
[1484] dddd. a VH comprising an HCDR1, an HCDR2, and an HCDR3 having an amino acid sequence of SEQ ID NOs:1068, 1069, and 1070, respectively, and a VL comprising an LCDR1, an LCDR2, and an LCDR3 having an amino acid sequence of SEQ ID NOs:1071, 1072, and 1073, respectively;
[1485] eeee. a VH comprising an HCDR1, an HCDR2, and an HCDR3 having an amino acid sequence of SEQ ID NOs: 1080, 1081, and 1082, respectively, and a VL comprising an LCDR1, an LCDR2, and an LCDR3 having an amino acid sequence of SEQ ID NOs:1083, 1084, and 1085, respectively;
[1486] ffff. a VH comprising an HCDR1, an HCDR2, and an HCDR3 having an amino acid sequence of SEQ ID NOs:1086, 1087, and 1088, respectively, and a VL comprising an LCDR1, an LCDR2, and an LCDR3 having an amino acid sequence of SEQ ID NOs:1089, 1090, and 1091, respectively;
[1487] gggg. a VH comprising an HCDR1, an HCDR2, and an HCDR3 having an amino acid sequence of SEQ ID NOs:1092, 1093, and 1094, respectively, and a VL comprising an LCDR1, an LCDR2, and an LCDR3 having an amino acid sequence of SEQ ID NOs:1095, 1096, and 1097, respectively;
[1488] hhhh. a VH comprising an HCDR1, an HCDR2, and an HCDR3 having an amino acid sequence of SEQ ID NOs:1098, 1099, and 1100, respectively, and a VL comprising an LCDR1, an LCDR2, and an LCDR3 having an amino acid sequence of SEQ ID NOs:1101, 1102, and 1103,
[1489] iiii. a VH comprising an HCDR1, an HCDR2, and an HCDR3 having an amino acid sequence of SEQ ID NOs:1104, 1105, and 1106, respectively, and a VL comprising an LCDR1, an LCDR2, and an LCDR3 having an amino acid sequence of SEQ ID NOs:1107, 1108, and 1109, respectively;
[1490] jjjj. a VH comprising an HCDR1, an HCDR2, and an HCDR3 having an amino acid sequence of SEQ ID NOs:1110, 1111, and 1112, respectively, and a VL comprising an LCDR1, an LCDR2, and an LCDR3 having an amino acid sequence of SEQ ID NOs:1113, 1114, and 1115, respectively;
[1491] kkkk. a VH comprising an HCDR1, an HCDR2, and an HCDR3 having an amino acid sequence of SEQ ID NOs:1116, 1117, and 1118, respectively, and a VL comprising an LCDR1, an LCDR2, and an LCDR3 having an amino acid sequence of SEQ ID NOs:1119, 1120, and 1121, respectively;
[1492] llll. a VH comprising an HCDR1, an HCDR2, and an HCDR3 having an amino acid sequence of SEQ ID NOs:1122, 1123, and 1124, respectively, and a VL comprising an LCDR1, an LCDR2, and an LCDR3 having an amino acid sequence of SEQ ID NOs:1125, 1126, and 1127, respectively;
[1493] mmmm. a VH comprising an HCDR1, an HCDR2, and an HCDR3 having an amino acid sequence of SEQ ID NOs:1128, 1129, and 1130, respectively, and a VL comprising an LCDR1, an LCDR2, and an LCDR3 having an amino acid sequence of SEQ ID NOs:1131, 1132, and 1133, respectively;
[1494] nnnn. a VH comprising an HCDR1, an HCDR2, and an HCDR3 having an amino acid sequence of SEQ ID NOs:1134, 1135, and 1136, respectively, and a VL comprising an LCDR1, an LCDR2, and an LCDR3 having an amino acid sequence of SEQ ID NOs:1137, 1138, and 1139, respectively;
[1495] oooo. a VH comprising an HCDR1, an HCDR2, and an HCDR3 having an amino acid sequence of SEQ ID NOs: 1140, 1141, and 1142, respectively, and a VL comprising an LCDR1, an LCDR2, and an LCDR3 having an amino acid sequence of SEQ ID NOs:1143, 1144, and 1145, respectively;
[1496] pppp. a VH comprising an HCDR1, an HCDR2, and an HCDR3 having an amino acid sequence of SEQ ID NOs:1146, 1147, and 1148, respectively, and a VL comprising an LCDR1, an LCDR2, and an LCDR3 having an amino acid sequence of SEQ ID NOs:1149, 1150, and 1151, respectively;
[1497] qqqq. a VH comprising an HCDR1, an HCDR2, and an HCDR3 having an amino acid sequence of SEQ ID NOs:1152, 1153, and 1154, respectively, and a VL comprising an LCDR1, an LCDR2, and an LCDR3 having an amino acid sequence of SEQ ID NOs:1155, 1156, and 1157,
[1498] rrrr. a VH comprising an HCDR1, an HCDR2, and an HCDR3 having an amino acid sequence of SEQ ID NOs:1158, 1159, and 1160, respectively, and a VL comprising an LCDR1, an LCDR2, and an LCDR3 having an amino acid sequence of SEQ ID NOs:1161, 1162, and 1163, respectively;
[1499] ssss. a VH comprising an HCDR1, an HCDR2, and an HCDR3 having an amino acid sequence of SEQ ID NOs:1164, 1165, and 1166, respectively, and a VL comprising an LCDR1, an LCDR2, and an LCDR3 having an amino acid sequence of SEQ ID NOs:1167, 1168, and 1169, respectively;
[1500] tttt. a VH comprising an HCDR1, an HCDR2, and an HCDR3 having an amino acid sequence of SEQ ID NOs:1170, 1171, and 1172, respectively, and a VL comprising an LCDR1, an LCDR2, and an LCDR3 having an amino acid sequence of SEQ ID NOs:1173, 1174, and 1175, respectively;
[1501] uuuu. a VH comprising an HCDR1, an HCDR2, and an HCDR3 having an amino acid sequence of SEQ ID NOs:1176, 1177, and 1178, respectively, and a VL comprising an LCDR1, an LCDR2, and an LCDR3 having an amino acid sequence of SEQ ID NOs:1179, 1180, and 1181, respectively;
[1502] vvvv. a VH comprising an HCDR1, an HCDR2, and an HCDR3 having an amino acid sequence of SEQ ID NOs:1182, 1183, and 1184, respectively, and a VL comprising an LCDR1, an LCDR2, and an LCDR3 having an amino acid sequence of SEQ ID NOs:1185, 1186, and 1187, respectively;
[1503] wwww. a VH comprising an HCDR1, an HCDR2, and an HCDR3 having an amino acid sequence of SEQ ID NOs:1188, 1189, and 1190, respectively, and a VL comprising an LCDR1, an LCDR2, and an LCDR3 having an amino acid sequence of SEQ ID NOs:1191, 1192, and 1193, respectively;
[1504] xxxx. a VH comprising an HCDR1, an HCDR2, and an HCDR3 having an amino acid sequence of SEQ ID NOs:1194, 1195, and 1196, respectively, and a VL comprising an LCDR1, an LCDR2, and an LCDR3 having an amino acid sequence of SEQ ID NOs:1197, 1198, and 1199, respectively;
[1505] yyyy. a VH comprising an HCDR1, an HCDR2, and an HCDR3 having an amino acid sequence of SEQ ID NOs:1200, 1201, and 1202, respectively, and a VL comprising an LCDR1, an LCDR2, and an LCDR3 having an amino acid sequence of SEQ ID NOs:1203, 1204, and 1205, respectively;
[1506] zzzz. a VH comprising an HCDR1, an HCDR2, and an HCDR3 having an amino acid sequence of SEQ ID NOs:1206, 1207, and 1208, respectively, and a VL comprising an LCDR1, an LCDR2, and an LCDR3 having an amino acid sequence of SEQ ID NOs:1209, 1210, and 1211, respectively; or
[1507] aaaaa. a VH comprising an HCDR1, an HCDR2, and an HCDR3 having an amino acid sequence of SEQ ID NOs:1212, 1213, and 1214, respectively, and a VL comprising an LCDR1, an LCDR2, and an LCDR3 having an amino acid sequence of SEQ ID NOs:1215, 1216, and 1217, respectively.

[1508] 27. The isolated monoclonal antibody or antigen binding fragment thereof of any of aspects 25 or 26 comprising:
[1509] a. a VH comprising the amino acid sequence of SEQ ID NO:138, and a VL comprising the amino acid sequence of SEQ ID NO:139;
[1510] b. a VH comprising the amino acid sequence of SEQ ID NO:142, and a VL comprising the amino acid sequence of SEQ ID NO:143;
[1511] c. a VH comprising the amino acid sequence of SEQ ID NO:144, and a VL comprising the amino acid sequence of SEQ ID NO:145;
[1512] d. a VH comprising the amino acid sequence of SEQ ID NO:148, and a VL comprising the amino acid sequence of SEQ ID NO:149;
[1513] e. a VH comprising the amino acid sequence of SEQ ID NO:150, and a VL comprising the amino acid sequence of SEQ ID NO:151;
[1514] f. a VH comprising the amino acid sequence of SEQ ID NO:152, and a VL comprising the amino acid sequence of SEQ ID NO:153;
[1515] g. a VH comprising the amino acid sequence of SEQ ID NO:154, and a VL comprising the amino acid sequence of SEQ ID NO:155;
[1516] h. a VH comprising the amino acid sequence of SEQ ID NO:156, and a VL comprising the amino acid sequence of SEQ ID NO:157;
[1517] i. a VH comprising the amino acid sequence of SEQ ID NO:158, and a VL comprising the amino acid sequence of SEQ ID NO:159;
[1518] j. a VH comprising the amino acid sequence of SEQ ID NO:160, and a VL comprising the amino acid sequence of SEQ ID NO:161;
[1519] k. a VH comprising the amino acid sequence of SEQ ID NO:162, and a VL comprising the amino acid sequence of SEQ ID NO:163;
[1520] l. a VH comprising the amino acid sequence of SEQ ID NO:164, and a VL comprising the amino acid sequence of SEQ ID NO:165;
[1521] m. a VH comprising the amino acid sequence of SEQ ID NO:166, and a VL comprising the amino acid sequence of SEQ ID NO:167;
[1522] n. a VH comprising the amino acid sequence of SEQ ID NO:168, and a VL comprising the amino acid sequence of SEQ ID NO:169;
[1523] o. a VH comprising the amino acid sequence of SEQ ID NO:170, and a VL comprising the amino acid sequence of SEQ ID NO:171;
[1524] p. a VH comprising the amino acid sequence of SEQ ID NO:172, and a VL comprising the amino acid sequence of SEQ ID NO:173;
[1525] q. a VH comprising the amino acid sequence of SEQ ID NO:174, and a VL comprising the amino acid sequence of SEQ ID NO:175;
[1526] r. a VH comprising the amino acid sequence of SEQ ID NO:176, and a VL comprising the amino acid sequence of SEQ ID NO:177;
[1527] s. a VH comprising the amino acid sequence of SEQ ID NO:178, and a VL comprising the amino acid sequence of SEQ ID NO:179;
[1528] t. a VH comprising the amino acid sequence of SEQ ID NO:180, and a VL comprising the amino acid sequence of SEQ ID NO:181;
[1529] u. a VH comprising the amino acid sequence of SEQ ID NO:182, and a VL comprising the amino acid sequence of SEQ ID NO: 183;
[1530] v. a VH comprising the amino acid sequence of SEQ ID NO:186, and a VL comprising the amino acid sequence of SEQ ID NO:187;
[1531] w. a VH comprising the amino acid sequence of SEQ ID NO:188, and a VL comprising the amino acid sequence of SEQ ID NO:189;
[1532] x. a VH comprising the amino acid sequence of SEQ ID NO:190, and a VL comprising the amino acid sequence of SEQ ID NO:191;
[1533] y. a VH comprising the amino acid sequence of SEQ ID NO:192, and a VL comprising the amino acid sequence of SEQ ID NO:193;
[1534] z. a VH comprising the amino acid sequence of SEQ ID NO:194, and a VL comprising the amino acid sequence of SEQ ID NO:195;
[1535] aa. a VH comprising the amino acid sequence of SEQ ID NO:196, and a VL comprising the amino acid sequence of SEQ ID NO:197;
[1536] bb. a VH comprising the amino acid sequence of SEQ ID NO:198, and a VL comprising the amino acid sequence of SEQ ID NO:199;
[1537] cc. a VH comprising the amino acid sequence of SEQ ID NO:200, and a VL comprising the amino acid sequence of SEQ ID NO:201;
[1538] dd. a VH comprising the amino acid sequence of SEQ ID NO:202, and a VL comprising the amino acid sequence of SEQ ID NO:203;
[1539] ee. a VH comprising the amino acid sequence of SEQ ID NO:204, and a VL comprising the amino acid sequence of SEQ ID NO:205;
[1540] ff. a VH comprising the amino acid sequence of SEQ ID NO:206, and a VL comprising the amino acid sequence of SEQ ID NO:207;
[1541] gg. a VH comprising the amino acid sequence of SEQ ID NO:208, and a VL comprising the amino acid sequence of SEQ ID NO:209;
[1542] hh. a VH comprising the amino acid sequence of SEQ ID NO:210, and a VL comprising the amino acid sequence of SEQ ID NO:211;
[1543] ii. a VH comprising the amino acid sequence of SEQ ID NO:212, and a VL comprising the amino acid sequence of SEQ ID NO:213;
[1544] jj. a VH comprising the amino acid sequence of SEQ ID NO:214, and a VL comprising the amino acid sequence of SEQ ID NO:215;
[1545] kk. a VH comprising the amino acid sequence of SEQ ID NO:216, and a VL comprising the amino acid sequence of SEQ ID NO:217;
[1546] ll. a VH comprising the amino acid sequence of SEQ ID NO:218, and a VL comprising the amino acid sequence of SEQ ID NO:219;
[1547] mm. a VH comprising the amino acid sequence of SEQ ID NO:220, and a VL comprising the amino acid sequence of SEQ ID NO:221;
[1548] nn. a VH comprising the amino acid sequence of SEQ ID NO:222, and a VL comprising the amino acid sequence of SEQ ID NO:223;
[1549] oo. a VH comprising the amino acid sequence of SEQ ID NO:226, and a VL comprising the amino acid sequence of SEQ ID NO:227;
[1550] pp. a VH comprising the amino acid sequence of SEQ ID NO:228, and a VL comprising the amino acid sequence of SEQ ID NO:229;
[1551] qq. a VH comprising the amino acid sequence of SEQ ID NO:230, and a VL comprising the amino acid sequence of SEQ ID NO:231;
[1552] rr. a VH comprising the amino acid sequence of SEQ ID NO:232, and a VL comprising the amino acid sequence of SEQ ID NO:233;
[1553] ss. a VH comprising the amino acid sequence of SEQ ID NO:234, and a VL comprising the amino acid sequence of SEQ ID NO:235;
[1554] tt. a VH comprising the amino acid sequence of SEQ ID NO:236, and a VL comprising the amino acid sequence of SEQ ID NO:237;
[1555] uu. a VH comprising the amino acid sequence of SEQ ID NO:238, and a VL comprising the amino acid sequence of SEQ ID NO:239;
[1556] vv. a VH comprising the amino acid sequence of SEQ ID NO:240, and a VL comprising the amino acid sequence of SEQ ID NO:241;
[1557] ww. a VH comprising the amino acid sequence of SEQ ID NO:246, and a VL comprising the amino acid sequence of SEQ ID NO:247;
[1558] xx. a VH comprising the amino acid sequence of SEQ ID NO:248, and a VL comprising the amino acid sequence of SEQ ID NO:249;
[1559] yy. a VH comprising the amino acid sequence of SEQ ID NO:250, and a VL comprising the amino acid sequence of SEQ ID NO:251;
[1560] zz. a VH comprising the amino acid sequence of SEQ ID NO:252, and a VL comprising the amino acid sequence of SEQ ID NO:253;
[1561] aaa. a VH comprising the amino acid sequence of SEQ ID NO:254, and a VL comprising the amino acid sequence of SEQ ID NO:255;
[1562] bbb. a VH comprising the amino acid sequence of SEQ ID NO:256, and a VL comprising the amino acid sequence of SEQ ID NO:257;
[1563] ccc. a VH comprising the amino acid sequence of SEQ ID NO:258, and a VL comprising the amino acid sequence of SEQ ID NO:259;
[1564] ddd. a VH comprising the amino acid sequence of SEQ ID NO:260, and a VL comprising the amino acid sequence of SEQ ID NO:261;
[1565] eee. a VH comprising the amino acid sequence of SEQ ID NO:262, and a VL comprising the amino acid sequence of SEQ ID NO:263;
[1566] fff. a VH comprising the amino acid sequence of SEQ ID NO:264, and a VL comprising the amino acid sequence of SEQ ID NO:265;
[1567] ggg. a VH comprising the amino acid sequence of SEQ ID NO:268, and a VL comprising the amino acid sequence of SEQ ID NO:269;
[1568] hhh. a VH comprising the amino acid sequence of SEQ ID NO:786, and a VL comprising the amino acid sequence of SEQ ID NO:787;
[1569] iii. a VH comprising the amino acid sequence of SEQ ID NO:788, and a VL comprising the amino acid sequence of SEQ ID NO:789;
[1570] jjj. a VH comprising the amino acid sequence of SEQ ID NO:790, and a VL comprising the amino acid sequence of SEQ ID NO:791;
[1571] kkk. a VH comprising the amino acid sequence of SEQ ID NO:792, and a VL comprising the amino acid sequence of SEQ ID NO:793;
[1572] lll. a VH comprising the amino acid sequence of SEQ ID NO:798, and a VL comprising the amino acid sequence of SEQ ID NO:799;
[1573] mmm. a VH comprising the amino acid sequence of SEQ ID NO:806, and a VL comprising the amino acid sequence of SEQ ID NO:807;
[1574] nnn. a VH comprising the amino acid sequence of SEQ ID NO:808, and a VL comprising the amino acid sequence of SEQ ID NO:809;
[1575] ooo. a VH comprising the amino acid sequence of SEQ ID NO:810, and a VL comprising the amino acid sequence of SEQ ID NO:811;
[1576] ppp. a VH comprising the amino acid sequence of SEQ ID NO:812, and a VL comprising the amino acid sequence of SEQ ID NO:813;
[1577] qqq. a VH comprising the amino acid sequence of SEQ ID NO:814, and a VL comprising the amino acid sequence of SEQ ID NO:815;
[1578] rrr. a VH comprising the amino acid sequence of SEQ ID NO:816, and a VL comprising the amino acid sequence of SEQ ID NO:817;
[1579] sss. a VH comprising the amino acid sequence of SEQ ID NO:818, and a VL comprising the amino acid sequence of SEQ ID NO:819;
[1580] ttt. a VH comprising the amino acid sequence of SEQ ID NO:820, and a VL comprising the amino acid sequence of SEQ ID NO:821;
[1581] uuu. a VH comprising the amino acid sequence of SEQ ID NO:822, and a VL comprising the amino acid sequence of SEQ ID NO:823;
[1582] vvv. a VH comprising the amino acid sequence of SEQ ID NO:824, and a VL comprising the amino acid sequence of SEQ ID NO:825;
[1583] www.a VH comprising the amino acid sequence of SEQ ID NO:826, and a VL comprising the amino acid sequence of SEQ ID NO:827;
[1584] xxx. a VH comprising the amino acid sequence of SEQ ID NO:828, and a VL comprising the amino acid sequence of SEQ ID NO:829;
[1585] yyy. a VH comprising the amino acid sequence of SEQ ID NO:830, and a VL comprising the amino acid sequence of SEQ ID NO:831;
[1586] zzz. a VH comprising the amino acid sequence of SEQ ID NO:832, and a VL comprising the amino acid sequence of SEQ ID NO:833;
[1587] aaaa. a VH comprising the amino acid sequence of SEQ ID NO:836, and a VL comprising the amino acid sequence of SEQ ID NO:837;
[1588] bbbb. a VH comprising the amino acid sequence of SEQ ID NO:838, and a VL comprising the amino acid sequence of SEQ ID NO:839;
[1589] cccc. a VH comprising the amino acid sequence of SEQ ID NO:840, and a VL comprising the amino acid sequence of SEQ ID NO:841;
[1590] dddd. a VH comprising the amino acid sequence of SEQ ID NO: 842, and a VL comprising the amino acid sequence of SEQ ID NO:843;
[1591] eeee. a VH comprising the amino acid sequence of SEQ ID NO:846, and a VL comprising the amino acid sequence of SEQ ID NO:847;
[1592] ffff. a VH comprising the amino acid sequence of SEQ ID NO:848, and a VL comprising the amino acid sequence of SEQ ID NO:849;
[1593] gggg. a VH comprising the amino acid sequence of SEQ ID NO:850, and a VL comprising the amino acid sequence of SEQ ID NO:851;
[1594] hhhh. a VH comprising the amino acid sequence of SEQ ID NO:852, and a VL comprising the amino acid sequence of SEQ ID NO:853;
[1595] iiii. a VH comprising the amino acid sequence of SEQ ID NO:854, and a VL comprising the amino acid sequence of SEQ ID NO:855;
[1596] jjjj. a VH comprising the amino acid sequence of SEQ ID NO:856, and a VL comprising the amino acid sequence of SEQ ID NO:857;
[1597] kkkk. a VH comprising the amino acid sequence of SEQ ID NO:858, and a VL comprising the amino acid sequence of SEQ ID NO:859;
[1598] llll. a VH comprising the amino acid sequence of SEQ ID NO:860, and a VL comprising the amino acid sequence of SEQ ID NO:861;
[1599] mmmm. a VH comprising the amino acid sequence of SEQ ID NO:862, and a VL comprising the amino acid sequence of SEQ ID NO:863;
[1600] nnnn. a VH comprising the amino acid sequence of SEQ ID NO:864, and a VL comprising the amino acid sequence of SEQ ID NO:865;
[1601] oooo. a VH comprising the amino acid sequence of SEQ ID NO:866, and a VL comprising the amino acid sequence of SEQ ID NO:867;
[1602] pppp. a VH comprising the amino acid sequence of SEQ ID NO:868, and a VL comprising the amino acid sequence of SEQ ID NO:869;
[1603] qqqq. a VH comprising the amino acid sequence of SEQ ID NO:870, and a VL comprising the amino acid sequence of SEQ ID NO:871;
[1604] rrrr. a VH comprising the amino acid sequence of SEQ ID NO:872, and a VL comprising the amino acid sequence of SEQ ID NO:873;
[1605] ssss. a VH comprising the amino acid sequence of SEQ ID NO:874, and a VL comprising the amino acid sequence of SEQ ID NO:875;
[1606] tttt. a VH comprising the amino acid sequence of SEQ ID NO:876, and a VL comprising the amino acid sequence of SEQ ID NO:877;
[1607] uuuu. a VH comprising the amino acid sequence of SEQ ID NO:878, and a VL comprising the amino acid sequence of SEQ ID NO:879;
[1608] vvvv. a VH comprising the amino acid sequence of SEQ ID NO:880, and a VL comprising the amino acid sequence of SEQ ID NO:881;
[1609] wwww. a VH comprising the amino acid sequence of SEQ ID NO:882, and a VL comprising the amino acid sequence of SEQ ID NO:883;
[1610] xxxx. a VH comprising the amino acid sequence of SEQ ID NO:884, and a VL comprising the amino acid sequence of SEQ ID NO:885;
[1611] yyyy. a VH comprising the amino acid sequence of SEQ ID NO:886, and a VL comprising the amino acid sequence of SEQ ID NO:887;
[1612] zzzz. a VH comprising the amino acid sequence of SEQ ID NO:888, and a VL comprising the amino acid sequence of SEQ ID NO:889; or aaaaa. a VH comprising the amino acid sequence of SEQ ID NO:890, and a VL comprising the amino acid sequence of SEQ ID NO:891.

[1613] 28. The antibody or fragment of any of aspects 1-27, wherein the antibody is an IgG.

[1614] 29. The antibody or fragment of any of aspects 1-28, wherein the antibody is a humanized or chimeric antibody or fragment thereof.

[1615] 30. The isolated antibody or fragment of any of aspects 1-28 which is an antibody or fragment thereof wherein said isolated antibody is the form of an antibody F(ab′)2, scFv fragment, domain antibody, minibody, diabody, triabody or tetrabody.

[1616] 31. The antibody of any of aspects 1-30, wherein the antibody is genetically fused or chemically conjugated to an agent,
[1617] wherein optionally the agent a detectable substance or is a drug,
[1618] wherein optionally the detectable substance is selected from enzymes, prosthetic groups, fluorescent materials, luminescent materials, bioluminescent materials or chemiluminescent materials,
[1619] wherein optionally the enzymes are selected from horseradish peroxidase, alkaline phosphatase, beta-galactosidase, or acetylcholinesterase;
[1620] wherein optionally the prosthetic groups are selected from streptavidin/biotin or avidin/biotin;
[1621] wherein optionally the fluorescent materials are selected from umbelliferone, fluorescein, fluorescein isothiocynate, rhodamine, dichlorotriazinylamine fluorescein, dansyl chloride, or phycoerythrin;
[1622] wherein optionally the luminescent material is luminol;
[1623] wherein optionally the bioluminescent materials are selected from luciferase, luciferin, or aequorin; and
[1624] wherein optionally the chemiluminescent materials are selected from 225 Acγ-emitting, Auger-emitting, β-emitting, an alpha-emitting or positron-emitting radioactive isotope.

[1625] 32. A nucleic acid molecule encoding the antibody of any of aspects 1-30 or a variable region or antigen binding fragment thereof.

[1626] 33. A vector comprising the nucleic acid molecule of aspect 32.

[1627] 34. A host cell transformed with the vector of aspect 33.

[1628] 35. A composition comprising the antibody of any of aspects 1-31, the nucleic acid molecule of claim 30, or the vector of claim 31, and a pharmaceutically acceptable excipient.

[1629] 36. A kit comprising the antibody of any of aspects 1-31.

[1630] 37. A method for detecting, selecting and/or enriching interleukin-23 receptor (IL-23R) in a sample comprising contacting the sample with the antibody of any of aspects 1 to 31,
[1631] wherein optionally the method comprising using the antibody of any of aspects 1 to 31 in an immunohistochemistry (IHC) assay, an immunocytochemistry (ICC) assay, an immunoblotting assay, an immunoprecipitation assay, a flow cytometry assay, an ELISA, a radioimmunoassay, a mass spectrometry assay, or high throughput screening assay;
[1632] wherein:
[1633] optionally the flow cytometry assay comprises three-steps of staining: (1) first, incubating the sample with the antibody of any of aspects 1 to 31; (2) second, incubating the sample with biotinylated anti-mouse IgG₂ₐ; (3) third, incubating the sample with streptavidin-PE; and wherein optionally, to establish the background for the flow cytometry assay, cells incubated with buffer alone or the negative control antibody are used as a control group in step (1), and cells incubated without the biotinylated anti-mouse IgG₂ₐ secondary reagent are used as an additional control group in step (2).

[1634] 38. A method for detecting, selecting and/or enriching interleukin-23 receptor (IL-23R) in a sample comprising contacting the sample with an antibody that binds to the same epitope as the antibody of any of aspects 1 to 31, or an antibody that binds IL-23R competitively with the antibody of any of aspects 1 to 31.

[1635] 39. The method of aspect 38, comprising contacting the sample with an antibody that binds to the same epitope and/or binds IL-23R competitively with the antibody comprising:
[1636] a. a VH comprising the amino acid sequence of SEQ ID NO:202 and a VL comprising the amino acid sequence of SEQ ID NO:203;
[1637] b. a VH comprising the amino acid sequence of SEQ ID NO:252 and a VL comprising the amino acid sequence of SEQ ID NO:253; or
[1638] c. a VH comprising the amino acid sequence of SEQ ID NO:156 and a VL comprising the amino acid sequence of SEQ ID NO:157.

[1639] 40. The method of aspect 38, comprising contacting the sample with an antibody that binds to the same epitope and/or binds IL-23R competitively with the antibody comprising:
[1640] a. a VH comprising the amino acid sequence of SEQ ID NO:192 and a VL comprising the amino acid sequence of SEQ ID NO:193;
[1641] b. a VH comprising the amino acid sequence of SEQ ID NO:194 and a VL comprising the amino acid sequence of SEQ ID NO:195;
[1642] c. a VH comprising the amino acid sequence of SEQ ID NO:200 and a VL comprising the amino acid sequence of SEQ ID NO:201;
[1643] d. a VH comprising the amino acid sequence of SEQ ID NO:218 and a VL comprising the amino acid sequence of SEQ ID NO:219;
[1644] e. a VH comprising the amino acid sequence of SEQ ID NO:222 and a VL comprising the amino acid sequence of SEQ ID NO:223;
[1645] f. a VH comprising the amino acid sequence of SEQ ID NO:260 and a VL comprising the amino acid sequence of SEQ ID NO:261;
[1646] g. a VH comprising the amino acid sequence of SEQ ID NO:264 and a VL comprising the amino acid sequence of SEQ ID NO:265;
[1647] h. a VH comprising the amino acid sequence of SEQ ID NO:154 and a VL comprising the amino acid sequence of SEQ ID NO:155;
[1648] i. a VH comprising the amino acid sequence of SEQ ID NO:160 and a VL comprising the amino acid sequence of SEQ ID NO:161; or
[1649] j. a VH comprising the amino acid sequence of SEQ ID NO:164 and a VL comprising the amino acid sequence of SEQ ID NO:165.

[1650] 41. The method of aspect 38, comprising contacting the sample with an antibody that binds to the same epitope and/or binds IL-23R competitively with the antibody comprising:
[1651] a. a VH comprising the amino acid sequence of SEQ ID NO:786 and a VL comprising the amino acid sequence of SEQ ID NO:787;
[1652] b. a VH comprising the amino acid sequence of SEQ ID NO:790 and a VL comprising the amino acid sequence of SEQ ID NO:791;
[1653] c. a VH comprising the amino acid sequence of SEQ ID NO:792 and a VL comprising the amino acid sequence of SEQ ID NO:793;
[1654] d. a VH comprising the amino acid sequence of SEQ ID NO:236 and a VL comprising the amino acid sequence of SEQ ID NO:237;
[1655] e. a VH comprising the amino acid sequence of SEQ ID NO:826 and a VL comprising the amino acid sequence of SEQ ID NO:827; or
[1656] f. a VH comprising the amino acid sequence of SEQ ID NO:828 and a VL comprising the amino acid sequence of SEQ ID NO:829.

[1657] 42. The method of aspect 38, comprising contacting the sample with an antibody that binds to the same epitope and/or binds IL-23R competitively with the antibody comprising:
[1658] a. a VH comprising the amino acid sequence of SEQ ID NO:196 and a VL comprising the amino acid sequence of SEQ ID NO:197;
[1659] b. a VH comprising the amino acid sequence of SEQ ID NO:262 and a VL comprising the amino acid sequence of SEQ ID NO:263; or
[1660] c. a VH comprising the amino acid sequence of SEQ ID NO:152 and a VL comprising the amino acid sequence of SEQ ID NO:153.

[1661] 43. The method of aspect 38, comprising contacting the sample with an antibody that binds to the same epitope and/or binds IL-23R competitively with the antibody comprising:
[1662] a. a VH comprising the amino acid sequence of SEQ ID NO:798 and a VL comprising the amino acid sequence of SEQ ID NO:799.

[1663] 44. The method of aspect 38, comprising contacting the sample with an antibody that binds to the same epitope and/or binds IL-23R competitively with the antibody comprising:
[1664] a. a VH comprising the amino acid sequence of SEQ ID NO:206 and a VL comprising the amino acid sequence of SEQ ID NO:207;
[1665] b. a VH comprising the amino acid sequence of SEQ ID NO:250 and a VL comprising the amino acid sequence of SEQ ID NO:251;
[1666] c. a VH comprising the amino acid sequence of SEQ ID NO:144 and a VL comprising the amino acid sequence of SEQ ID NO:145; or
[1667] d. a VH comprising the amino acid sequence of SEQ ID NO:170 and a VL comprising the amino acid sequence of SEQ ID NO:171.

[1668] 45. The method of aspect 38, comprising contacting the sample with an antibody that binds to the same epitope and/or binds IL-23R competitively with the antibody comprising:
[1669] a. a VH comprising the amino acid sequence of SEQ ID NO:150 and a VL comprising the amino acid sequence of SEQ ID NO:151.

[1670] 46. The method of aspect 38, comprising contacting the sample with an antibody that binds to the same epitope and/or binds IL-23R competitively with the antibody comprising:
[1671] a. a VH comprising the amino acid sequence of SEQ ID NO:198 and a VL comprising the amino acid sequence of SEQ ID NO:199; or
[1672] b. a VH comprising the amino acid sequence of SEQ ID NO:240 and a VL comprising the amino acid sequence of SEQ ID NO:241.

[1673] 47. The method of aspect 38, comprising contacting the sample with an antibody that binds to the same epitope and/or binds IL-23R competitively with the antibody comprising:
[1674] a. a VH comprising the amino acid sequence of SEQ ID NO:204 and a VL comprising the amino acid sequence of SEQ ID NO:205; or
[1675] b. a VH comprising the amino acid sequence of SEQ ID NO:884 and a VL comprising the amino acid sequence of SEQ ID NO:885.

[1676] 48. The method of any of aspects 37 to 47, wherein the method is for detecting, selecting and/or enriching human IL-23R.

[1677] 49. The method of any of aspects 37 to 47, wherein the method is for detecting, selecting and/or enriching cells that express IL-23R.

[1678] 50. The method of any of aspects 37 to 47, wherein the method is for detecting denatured IL-23R.

[1679] 51. The method of any of aspects 37 to 47, wherein the method comprising contacting the sample with two or more antibodies each being the antibody of any of aspects1 to 29.

[1680] 52. The method of aspect 49, wherein the two or more antibodies bind to different epitopes of IL-23R.

[1681] 53. The method of any of aspects 37 to 52, wherein the sample is from a human subject.

[1682] 54. The method of aspect 53, wherein the human subject has a disease or disorder.

[1683] 55. The method of aspect 54, wherein the disease or disorder is an IL-23R associated disease or disorder.

[1684] 56. The method of aspect 53, wherein the human subject is a healthy human subject.

[1685] 57. A method of antagonizing or inhibiting IL-23R in a cell comprising contacting the cell with the antibody of any of aspects 1 to 31.

[1686] 58. A method of treating a disease or disorder in a subject, comprising administering to the subject the composition of aspect 35 or the antibody of any of aspects 1 to 31.

[1687] 59. The method of aspect 58, wherein the disease or disorder is an IL-23R associated disease or disorder.

[1688] 60. The method according to aspect 58, wherein the disease or disorder is associated with inflammatory, autoimmune inflammation diseases and/or related disorders.

[1689] 61. The method according to aspect 60, wherein the disease or disorder associated with inflammatory, autoimmune inflammation diseases and/or related disorders is selected from multiple sclerosis, asthma, rheumatoid arthritis, inflammation of the gut, inflammatory bowel diseases (IBDs), juvenile IBD, adolescent IBD, Crohn's disease, ulcerative colitis, Celiac disease (nontropical Sprue), microscopic colitis, collagenous colitis, eosinophilic gastroenteritis/esophagitis, colitis associated with radio- or chemo-therapy, colitis associated with disorders of innate immunity as in leukocyte adhesion deficiency-1, sarcoidosis, Systemic Lupus Erythematosus, ankylosing spondylitis (axial spondyloarthritis), psoriatic arthritis, psoriasis (e.g., plaque psoriasis, guttate psoriasis, inverse psoriasis, pustular psoriasis, Palmo-Plantar Pustulosis, psoriasis vulgaris, or erythrodermic psoriasis), atopic dermatitis, acne ectopica, enteropathy associated with seronegative arthropathies, chronic granulomatous disease, glycogen storage disease type 1b, Hermansky-Pudlak syndrome, Chediak-Higashi syndrome, Wiskott-Aldrich Syndrome, pouchitis, pouchitis resulting after proctocolectomy and ileoanal anastomosis, gastrointestinal cancer, pancreatitis, insulin-dependent diabetes mellitus, mastitis, cholecystitis, cholangitis, primary biliary cirrhosis, viral-associated enteropathy, pericholangitis, chronic bronchitis, chronic sinusitis, asthma, uveitis, or graft versus host disease.

[1690] 62. The method of aspect 61, wherein the disease or disorder is associated with an autoimmune disease is selected from Ulcerative colitis (UC), Crohn's Disease (CD), psoriasis (PsO), or psoriatic arthritis (PsA).

[1691] 63. Use of an antibody or antigen binding fragment thereof of any of aspects 1-31 or a composition of aspect 35 in the manufacture of a medicament for treatment of an IL-23R associated disease or disorder, particularly a disease or disorder associated with inflammatory, autoimmune inflammation diseases and/or related disorders.

[1692] 64. The antibody or antigen binding fragment of any of aspects 1-31 or the composition of aspect 35 for use in the treatment of an IL-23R associated disease or disorder, particularly a disease or disorder associated with inflammatory, autoimmune inflammation diseases and/or related disorders

[1693] A number of embodiments of the invention have been described. Nevertheless, it will be understood that various modifications may be made without departing from the spirit and scope of the invention. Accordingly, the following examples are intended to illustrate but not limit the scope of invention described in the claims.

### EXAMPLES

[1694] The following is a description of various methods and materials used in the studies, and are put forth so as to provide those of ordinary skill in the art with a complete disclosure and description of how to make and use the present disclosure, and are not intended to limit the scope of what the inventors regard as their disclosure nor are they intended to represent that the experiments below were performed and are all of the experiments that may be performed. It is to be understood that exemplary descriptions written in the present tense were not necessarily performed, but rather that the descriptions can be performed to generate the data and the like associated with the teachings of the present disclosure. Efforts have been made to ensure accuracy with respect to numbers used (e.g., amounts, percentages, etc.), but some experimental errors and deviations should be accounted for.

### IL-23R Antibody Discovery and Characterization Summary

[1695] Discovery of monoclonal antibodies (mAbs) that bind human interleukin (IL)-23 (IL-23) receptor was done by both wild type mouse immunization and phage display and selection using proprietary Janssen de novo human and mouse Fab libraries. Recombinant human IL-23 receptor (IL-23R) extracellular domain (ECD) protein (sequence shown in Table 3) was used as the antigen in both the immunization and phage display approaches, with the IL-23R ECD protein validated for IL-23 binding. A panel of human IL-23R binding mAbs was identified through both approaches that included both mouse antibodies from immunization and phage display and human antibodies from phage display only.

TABLE 3
Amino acid sequence of human IL-23R ECD

| | Sequence |
|---|---|
| Q5VWK51 | GITNINCSGHIWVEPATIFKMGMNISIYCQAAIKN |
| 24-355 | CQPRKLHFYKNGIKERFQITRINKTTARLWYKNFL |
| ECD | EPHASMYCTAECPKHFQETLICGKDISSGYPPDIP |
| | DEVTCVIYEYSGNMTCTWNAGKLTYIDTKYVVHVK |
| | SLETEEEQQYLTSSYINISTDSLQGGKKYLVWVQA |
| | ANALGMEESKQLQIHLDDIVIPSAAVISRAETINA |
| | TVPKTIIYWDSQTTIEKVSCEMRYKATTNQTWNVK |
| | EFDTNFTYVQQSEFYLEPNIKYVFQVRCQETGKRY |
| | WQPWSSLFFHKTPETVPQVTSKAFQHDTWNSGLTV |
| | ASISTGHLTSDNRGDIG |
| | (SEQ ID NO: 1) |

[1696] All human IL-23R binding mAbs discovered were cloned with mouse IgG₂ₐ and mouse kappa constant domains and expressed recombinantly from mammalian cells for detailed characterization. Those mAbs originally identified as mouse antibodies were full mouse mAbs when recombinantly produced and those originally identified as human antibodies were human/mouse chimeric mAbs when recombinantly produced. The recombinant IL-23R binding mAbs expressed in mammalian cells were characterized as unpurified proteins in crude mammalian expression supernatants, as purified proteins or in both forms, with much of the characterization not requiring purified protein. Characterization of the IL-23R mAbs included determination of affinity to human and rat IL-23R ECD protein, determination of binding to recombinant cells lines expressing cell surface human IL-23R or primary human cells expressing IL-23R and determination of the number of human IL-23R ECD epitope/competition bins covered by the mAbs in this panel.

[1697] The human IL-23R binding mAbs discovered, cloned, expressed, characterized and described here have a range of affinities to human IL-23R ECD. The antibodies demonstrate activities and binding capabilities which are unique to and/or better than other known IL-23R antibodies, including commercially available IL-23R antibodies. Most of the human IL-23R binding antibodies herein demonstrate and have higher affinity, some with substantially higher affinity, than the commercially available IL-23R mAbs tested. The antibodiesrecognize multiple distinct epitopes on the IL-23R extracellular domain. Some of the antibodies have cross-reactive binding to rat IL-23R ECD and bind to both human IL-23R and rat IL-23R, particularly binding to human IL-23R ECD and rat IL-23R ECD. Many of these mAbs show binding to both recombinant cell lines and primary human cells expressing human IL-23R, and demonstrate and have cell binding that is better than that of the commercially available IL-23R mAbs tested. The novel IL-23R antibodies provided herein comprise unique sequences and distinct and relevant binding characteristics and affinity, even among and between one another, as well as in comparison to other known and available antibodies including commercially available antibodies.

### Example 1: IL-23R mAb Discovery

[1698] Discovery of monoclonal antibodies (mAbs) that bind human interleukin (IL)-23 (IL-23) receptor was done by both wild type mouse immunization and phage display.

### Immunization Based IL-23R mAb Discovery

[1699] Recombinant human IL-23R extracellular (ECD) protein antigen was prepared with adjuvant for immunization. AJ and C3H mice were injected with prepared IL-23R antigen+CL413 IP on days 0, 14, 28, and 47. The surviving mice were euthanized on day 54, 7 days post final boost, and spleens and serum were harvested. Splenocytes from harvested spleens of 9 total individual mice, three A/J and six C3H, were stained with biotinylated human IL-23R/Fc and AF647 labeled ILT4/Fc (to exclude Fc binders). With gating set for IL-23R+ and ILT4/Fc−, a total of 7040 single B cells were sorted into 20-384 well plates containing single B cell (SBC) media. Six days post sort, supernatants were collected and B cells were lysed for all 20 plates of cultured single B cells. Supernatants were diluted 1:2 in PBS/BSA (0.4%) and stored at 4° C. Lysate plates were stored at −80° C. Supernatants were subsequently screened for binding to human IL-23R ECD protein and for IgG concentration using Meso Scale Discovery (MSD)-based assays.

[1700] 876 SBC clones were identified with >10-fold IL-23R binding over background and the IgG quantification assay identified 451 clones with >2 ng/ml IgG, with 421 clones meeting both criteria. From these 421 clones, 384 were selected based on IL-23R binding over background being >63-fold and IgG expression being >10 ng/ml. The antibody heavy chain (HC) and light chain (LC) variable regions (VH and VL, respectively) were cloned from the frozen lysates of the cultured single B cells using a 5′ RACE V-region cloning method. VH and VL regions obtained were cloned with mouse IgG₂ₐ and mouse kappa constant regions, respectively, into separate mammalian cell expression vectors. Not all V-regions were successfully amplified and cloned. Plasmid DNA was prepared for all expression constructs generated for use in various scales of expression of the recombinant antibodies. Expression constructs were not sequenced and were considered non-clonal at this stage.

### Phage Display Based IL-23R mAb Discovery

[1701] Human IL-23 receptor binding Fabs were selected from in-house generated mouse de novo Fab-pIX phage display libraries or human de novo Fab-pIX display libraries as described in Shi et al., J Mol Biol 397:385-96, 2010 and Int. Pat. Publ. No. WO2009/085462; U.S. Pat. Publ. No. US2010/0021477, following standard protocols (Cheadle, E. J. et al. Antibody Engineering. 907, 645-666 (2012).

[1702] Phage panning. In the phage selections, biotinylated purified recombinant biotinylated human IL-23 receptor (IL-23R) extracellular domain (ECD) was used as the antigen to capture and immobilize the phage binders. 42 panning experiments (I23RXP1 to 36, I23RXP53 to 57) using the mouse libraries and 8 panning experiments (I23RXP37 and 38, I23RXP47 to 52) using the human libraries were run. In each panning experiment, a specific combination of library(s) and panning conditions was used. Briefly, the phage libraries and paramagnetic streptavidin (SA) beads were blocked in 50% Chemiblocker (Millipore cat #2170)/50% 1×TBST (Teknova cat #T0310) for one hour. Libraries were added to the SA beads to adsorb clones that bind non-specifically to the beads. SA beads were discarded and the pre-cleared library was added to biotinylated human IL-23R ECD. Binders were retrieved by addition of SA beads to form a bead/antigen/phage complex, which was washed in 1×TBST. After the final wash, phage was rescued by infection of log phase TG1 E. coli cells (OD600 nm=0.4-0.6). The phage-infected TG1 cells were spread on three 150 mm LB agar plates containing 75 μg/ml carbenicillin and 1% glucose and grown overnight at 37° C. Phage was produced and subjected to additional panning. To increase selection pressure, the antigen concentration was reduced for each subsequent round: R1 100 nM, R2 50 nM, R3 10 nM, R4 10 nM, R1-R4 all for 1 hour at room temperature; R5 5 nM, overnight at 4° C.; R6 2.5 nM, overnight at 4° C.

[1703] After multiple selection rounds, a polyclonal phage ELISA using human IL-23R ECD was performed to determine the enrichment of antigen-specific binders in individual panning experiments (representative polyclonal phage ELISA in FIG. 1).

[1704] Polyclonalphage ELISA. Briefly, 100 μl of 20 nM biotinylated human IL-23R ECD diluted in 1×TBS (Teknova cat #T9530) was captured on an NA-coated plate (Thermo cat #15217). After an hour incubation at 37° C., the plate was washed 3 times in 300 μl 1×TBST per well. 300 μl of blocking buffer 50% Chemiblocker/50% 1×TBST was added to each well of the plate and incubated at room temperature for 1 hour. After blocking, the plate was washed 3 times with 300 μl of 1×TBST per well. Polyclonal phage output for each panning round of each panning experiment was diluted 1/100 diluted in assay buffer (10% Chemiblocker/90% 1×TBST). 100 μL of these diluted phage outputs was added to the blocked ELISA plate and incubated at room temperature for 1 hour to allow the binding of Fab displayed on the phage particles to the immobilized human IL-23R ECD. Following the incubation, the plate was washed 3 times with 1×TBST. 100 μl of HRP-conjugated anti-M13 (pVIII) antibody (GE Healthcare cat #27942101) diluted 1:2500 in assay buffer was added to the plate and incubated at room temperature. After 1 hour incubation, the plate was washed 6 times with 300 μl of 1×TBST per well. 100 μL of prepared BM chemiluminescence ELISA substrate (Roche cat #11582950001) was added to the plate. The chemiluminescence or relative light unit (RLU) was measured in an Envision plate reader.

[1705] Phage collected from panning experiments which demonstrated enrichment for human IL-23R ECD binders, were used to express monoclonal Fab proteins in E. coli for primary screening.

[1706] Fab production. Briefly, plasmid DNA was isolated and purified from glycerol stocks of specific rounds of phage panning experiments that were identified as demonstrating enrichment of binders to human IL-23 receptor and transformed into TG-1 E. coli cells and grown on LB agar plates overnight. The plates of transformants were used for (i) colony PCR and sequencing of the V-regions and (ii) starter cultures for Fab production. For Fab production, the overnight cultures were diluted 10-100 fold in new media, grown for 5-6 hours at 37° C. and Fab production induced by the addition of fresh media containing IPTG. Induced cultures were grown overnight at 30° C. The cultures were spun down and the bacterial pellet was lysed using BugBuster™ (Millipore) to release the soluble Fab proteins. The cell lysates were cleared by centrifugation and the supernatants were used for Fab ELISA.

[1707] Monoclonal Fab lysates that were prepared from the enriched Fab libraries were screened by ELISA for binding to human IL-23 receptor and lack of binding to a negative control antigen, mouse IL-6.

[1708] Monoclonal Fab screening. Black maxisorp plates (ThermoFisher Scientific, Cat #437111) were coated with 100 μl of 10 ng/μl goat anti-mouse Fab2 (Jackson Immuno Research, Code #115-005-072) or 4 ng/μl of sheep anti-human Fd (The Binding Site Group, Product Code AU075). After overnight incubation at 4° C., the coated plates were blocked with 250p1 of Chemiblocker (Milipore, Cat #2170) and incubated at room temperature for 1 hour. 100 μl of each Fab sample were added to wells and the plates were incubated at room temperature for 1 hour with shaking at 20 rpm, followed by 5 washes with 1×TBST. 100 μl of 20 nM biotinylated human IL-23 receptor ECD or murine IL-6 (counter screening) were added to wells and incubated at room temperature for 1 hour with shaking 20 rpm, followed by 5 washes with 1×TBST. 100 μl of 1:5000 strepavidin HRP were added, and the plates incubated at room temperature for 40 minutes, followed by 3 washes with 1×TBST. 100 μL per well of prepared BM chemiluminescence ELISA substrate (Roche cat #11582950001) was added to the plate. The chemiluminescence or relative light unit (RLU) was measured in an Envision plate reader.

[1709] Fab clones meeting the selection criteria of binding to human IL-23 receptor and not binding to a negative control antigen, mouse IL-6, were sequenced to identify the unique Fabs (representative monoclonal Fab ELISA in FIG. 2).

[1710] Heavy chain (HC) and light chain (LC) variable (V) regions (VH and VL, respectively) of the unique Fab were cloned into mammalian expression vectors to express recombinant mAbs with murine IgG₂ₐ/murine Kappa constant regions. Plasmid DNA was prepared for all expression constructs generated for use in various scales of expression of the recombinant antibodies.

[1711] Cloning VH and VL of IL-23R binding Fab hits. Two pcDNA3.1 derived mammalian expression vectors (vDR000368 and vDR000961) were used to generate the single gene constructs encoding a heavy chain (HC) or light chain (LC) for each Fab hit. Each vector contains a human cytomegalovirus (hCMV) promoter to drive the expression of the HC and LC and both contain the ampicillin resistance gene (Amp(R)) to facilitate cloning. vDR000368 has unique HindIII and DraIII restriction enzyme sites for VH cloning and also a mouse IgG₂ₐ constant region; vDR000961 has unique HindIII and Tth111I restriction enzyme sites for VL cloning and also a mouse Kappa constant region.

### IL-23R mAb Expression and Purification

[1712] Recombinant IL-23R binding mAbs discovered from both the immunization and phage display strategies were transiently expressed in either ExpiCHO or HEK Expi293™ cells in various expression volumes from 2 ml to 500 ml using prepared and quantitated plasmid DNA of the heavy chain (HC) and light chain (LC) mammalian expression constructs generated for these mAbs.

[1713] Expression in transiently transfected HEK Expi293™ cells. HEK Expi293™ cells (Thermo cat #A14527) were grown in Expi293™ expression media (Thermo cat #A1435101) at 37° C. shaking at 125RPM with 8% CO₂. The cells were transfected at 2.5×10⁶ cells per ml using Expi293™ Expression Kit (Thermo cat #A14524). For each liter of cells transfected, 1 mg of total DNA was diluted in 25 ml of Opti-MEM (Thermo cat #319850620) and 2.6 ml of Expi293™ reagent was diluted in 25 ml of Opti-MEM and incubated for 5 minutes at room temperature. The diluted DNA and diluted Expi293 reagent were combined and incubated for 20 minutes at room temperature. The DNA complex was then added to the cells and the cells placed in the shaking incubator overnight. The next day after transfection, 5 ml of Enhancer 1 was diluted into 50 ml of Enhancer 2 and the total volume of the two Enhancers was added to the cells. The transfected cells were placed back into the incubator for 4 days until harvested. The cells were removed by centrifugation at 4,500 g for 35 minutes then the cleared culture is filtered with a 0.2 μm filter prior to checking expression levels. This protocol can be used with varying expression volumes by adjusting reagents in a linear manner. When transfection is done with 96-well plates incubation is done in an incubator with a 3 mm shaking diameter set at 1,000 RPM. Expression was quantitated by Octet using Protein A biosensors. Murine IgG2 (Sigma Cat #M9144) was used as the standard. The samples and the standard were diluted with spent Expi293 media. The standard curve was generated with two-fold dilutions starting at 100 μg/ml, using the linear portion. The samples were diluted 1:10 for measurement. The calculations were performed by the Forte Biosystems software.

[1714] Expression in transiently transfected ExpiCHO cells. Transient transfection using ExpiCHO-S™ cells (ThermoFisher Scientific, Cat #A29127) with purified DNA plasmid following manufacturer's recommendations. Briefly, ExpiCHO-S™ cells were maintained in suspension in ExpiCHO™ expression medium (ThermoFisher Scientific, Cat #A29100) in a shaking incubator set at 37° C., 8% CO₂ and 125 RPM. The cells were passaged so that on the day of transfection, dilution down to 6.0×10⁶ cells per ml could be achieved, maintaining cell viability at 98% or better. Transient transfections were done using the ExpiFectamine™ CHO transfection kit (ThermoFisher Scientific Cat #A29131). For each ml of diluted cells to be transfected, one microgram of plasmid DNA is used and diluted into OptiPRO™ SFM complexation medium. ExpiFectamine™ CHO reagent is used at a 1:3 ratio (v/v, DNA:reagent) and also diluted into OptiPRO™. The diluted DNA and transfection reagent were combined for one minute, allowing DNA/lipid complex formation, and then added to the cells. After overnight incubation, ExpiCHO™ feed and ExpiFectamine™ CHO enhancer were added to the cells. Cells were cultured with shaking at 32° C. for five days prior to harvesting the culture supernatants. Culture supernatants from the transiently transfected ExpiCHO-S™ cells were harvested by clarifying through centrifugation (35 min, 6,500 rpm) followed by filtration (0.24 PES membrane, Corning).

[1715] The crude mammalian expression supernatants, after quantitation of mAb concentration, were used directly for some characterization of the unpurified mAbs contained within. Some IL-23R mAbs were purified using a routine Protein A purification protocol and characterized as purified mAbs.

[1716] Protein A purification of mAbs expressed in transient transfections. Pilot scale (0.3-3 mgs) purifications were performed on the AKTA Xpress chromatography system and large-scale (3 mgs or greater) purifications were performed using the AKTA FPLC chromatography systems. The purification procedures for pilot and large-scale preps were identical. Briefly, harvested, clarified and filtered supernatants from transiently transfected mammalian cells were loaded onto an equilibrated (PBS, pH 7.2) HiTrap MabSelect Sure Protein A column (GE Healthcare) at a relative concentration of ˜30 mg protein per ml of resin. After loading, the column was washed with PBS, pH7.2 and protein eluted with 10 column volumes of 0.1 M Na-Acetate, pH 3.5. The protein fractions were neutralized immediately by elution into tubes containing 2.0 M Tris, pH 7 at 20% the elution fraction volume. Peak fractions were pooled, further neutralized, if necessary, filtered (0.2 μm) and dialyzed against 3 changes of PBS, pH 7.2 overnight at 4° C. The next day, samples were removed from dialysis, filtered (0.2 μm) and the protein concentration determined by absorbance at 280 nm. The quality of the purified proteins was assessed by SDS-PAGE and analytical size exclusion HPLC (Dionex HPLC system). Endotoxin levels were measured using a LAL assay (Pyrotell®-T, Associates of Cape Cod). Purified proteins were stored at 4° C.

Exemplary IL-23R mAbs

[1717] Examples of immunization based IL-23R antibodies or antigen binding fragments of the present disclosure are summarized in Table 4, Table 5 and Table 6:

TABLE 4
HC and LC AA Sequences of Exemplary Immunization Based IL-23R Antibodies

| Name | HC AA Seq | LC AA Seq |
|---|---|---|
| I23RB101 | EVQLQQSGAEVKKPGSSVKVSCKA | DIVMTQSHKFMSTSIGDRVSITCKTSQDV |
| | SGGTFSSYAISWVRQAPGQGLEWM | RTAVAWYQQKPGQSPKLLIYSASYRYIG |
| | GWINPNSGGTNYAQKFQGRVTMTR | VPDRFTGSGSGTDFTFTISDVQAEDLALY |
| | DTSISTAYMELSRLRSDDTAVYYCA | YCQQHYSTPYTFGGGTKLEIKRADAAPT |
| | RGYRYGPLDGFDIWGQGTTLTVSSA | VSIFPPSSEQLTSGGASVVCFLNNFYPKDI |
| | KTTAPSVYPLAPVCGDTTGSSVTLG | NVKWKIDGSERQNGVLNSWTDQDSKDS |
| | CLVKGYFPEPVTLTWNSGSLSSGVH | TYSMSSTLTLTKDEYERHNSYTCEATHKT |
| | TFPAVLQSDLYTLSSSVTVTSSTWPS | STSPIVKSFNRNEC (SEQ ID NO: 3) |
| | QSITCNVAHPASSTKVDKKIEPRGPT | |
| | IKPCPPCKCPAPNLLGGPSVFIFPPKI | |
| | KDVLMISLSPIVTCVVVDVSEDDPD | |
| | VQISWFVNNVEVHTAQTQTHREDY | |
| | NSTLRVVSALPIQHQDWMSGKEFK | |
| | CKVNNKDLPAPIERTISKPKGSVRAP | |
| | QVYVLPPPEEEMTKKQVTLTCMVT | |
| | DFMPEDIYVEWTNNGKTELNYKNT | |
| | EPVLDSDGSYFMYSKLRVEKKNWV | |
| | ERNSYSCSVVHEGLHNHHTTKSFSR | |
| | TPGK (SEQ ID NO: 2) | |
| I23RB102 | QVQLQQPGAELVKPGASVKVSCKA | DIQMTQSPASLSVSVGETVTITCRASENIY |
| | SGYTFTKYWINWMNQRPGQGLEWI | SHITWYQLKQGKSPQLLVYASTNLADDV |
| | GNIYPGSISTNYNEKFKSKVTLTVDI | PSRFSGSGSGTQYSLKINSLLSEDFGTYYC |
| | SSSTAYMQLSSLTSDDSAVYYCARG | QHFWGTPWTFGGGTKLEMKRADAAPTV |
| | DFYALDYWGQGTTLTVSSAKTTAP | SIFPPSSEQLTSGGASVVCFLNNFYPKDIN |
| | SVYPLAPVCGDTTGSSVTLGCLVKG | VKWKIDGSERQNGVLNSWTDQDSKDST |
| | YFPEPVTLTWNSGSLSSGVHTFPAV | YSMSSTLTLTKDEYERHNSYTCEATHKTS |
| | LQSDLYTLSSSVTVTSSTWPSQSITC | TSPIVKSFNRNEC (SEQ ID NO: 5) |
| | NVAHPASSTKVDKKIEPRGPTIKPCP | |
| | PCKCPAPNLLGGPSVFIFPPKIKDVL | |
| | MISLSPIVTCVVVDVSEDDPDVQIS | |
| | WFVNNVEVHTAQTQTHREDYNSTL | |
| | RVVSALPIQHQDWMSGKEFKCKVN | |
| | NKDLPAPIERTISKPKGSVRAPQVYV | |
| | LPPPEEEMTKKQVTLTCMVTDFMPE | |
| | DIYVEWTNNGKTELNYKNTEPVLD | |
| | SDGSYFMYSKLRVEKKNWVERNSY | |
| | SCSVVHEGLHNHHTTKSFSRTPGK | |
| | (SEQ ID NO: 4) | |
| I23RB104 | EVKLVESGGGLVKPGGSLKLSCAAS | DIQMTQSPASLSVSVGETVTITCRASENIY |
| | GFTFSSYAMSWVRQTPEKRLDWVA | SNLAWYQQKQGKSPQLLVYAATNLADG |
| | SISTGGSTYYPDSVKGGFTISRDIAR | VPSRFSGSGSGTQYSLKINSLQSEDFGSYY |
| | NTLSLQMTSLRSEDTAMYYCARGP | CQHFWGTPPTFGSGTKLEIKRADAAPTVS |
| | HYYGGSYPFAYWGQGTTLTVSSAK | IFPPSSEQLTSGGASVVCFLNNFYPKDINV |
| | TTAPSVYPLAPVCGDTTGSSVTLGC | KWKIDGSERQNGVLNSWTDQDSKDSTYS |
| | LVKGYFPEPVTLTWNSGSLSSGVHT | MSSTLTLTKDEYERHNSYTCEATHKTSTS |
| | FPAVLQSDLYTLSSSVTVTSSTWPSQ | PIVKSFNRNEC (SEQ ID NO: 7) |
| | SITCNVAHPASSTKVDKKIEPRGPTI | |
| | KPCPPCKCPAPNLLGGPSVFIFPPKIK | |
| | DVLMISLSPIVTCVVVDVSEDDPDV | |
| | QISWFVNNVEVHTAQTQTHREDYN | |
| | STLRVVSALPIQHQDWMSGKEFKC | |
| | KVNNKDLPAPIERTISKPKGSVRAPQ | |
| | VYVLPPPEEEMTKKQVTLTCMVTD | |
| | FMPEDIYVEWTNNGKTELNYKNTE | |
| | PVLDSDGSYFMYSKLRVEKKNWVE | |
| | RNSYSCSVVHEGLHNHHTTKSFSRT | |
| | PGK (SEQ ID NO: 6) | |
| I23RB144 | EVQLQQSGPELVKPGASVKMSCKA | DIVMTQSPLTLSVIIGQSASISCKSSQSLLD |
| | SGYTFTSYIIHWVKQKPGQGLEWIG | SDGKTYLNWLLQRPGQSPKRLMYLVSKL |
| | YIDPYNDDTKYNEKFKGKATLTSD | DSGVPDRFTGSGSGTDFTLKISRVEAEDL |
| | KSSSTAYMEFSSLTSEDSAVYYCAR | GVYYCWQGIHFPLTFGSGTRLEIKRADAA |
| | LGSINYYDGSYFDYWGQGTSVTVSS | PTVSIFPPSSEQLTSGGASVVCFLNNFYPK |
| | AKTTAPSVYPLAPVCGDTTGSSVTL | DINVKWKIDGSERQNGVLNSWTDQDSKD |
| | GCLVKGYFPEPVTLTWNSGSLSSGV | STYSMSSTLTLTKDEYERHNSYTCEATHK |
| | HTFPAVLQSDLYTLSSSVTVTSSTW | TSTSPIVKSFNRNEC (SEQ ID NO: 9) |
| | PSQSITCNVAHPASSTKVDKKIEPRG | |
| | PTIKPCPPCKCPAPNLLGGPSVFIFPP | |
| | KIKDVLMISLSPIVTCVVVDVSEDDP | |
| | DVQISWFVNNVEVHTAQTQTHRED | |
| | YNSTLRVVSALPIQHQDWMSGKEF | |
| | KCKVNNKDLPAPIERTISKPKGSVR | |
| | APQVYVLPPPEEEMTKKQVTLTCM | |
| | VTDFMPEDIYVEWTNNGKTELNYK | |
| | NTEPVLDSDGSYFMYSKLRVEKKN | |
| | WVERNSYSCSVVHEGLHNHHTTKS | |
| | FSRTPGK (SEQ ID NO: 8) | |
| I23RB148 | DVQLQESGPDLVKPSQSLSLTCTVT | DIVMTQSHKFMSTSVGDRVSLTCKASQE |
| | GYSITSGYNWHWIRQFPGNKLEWM | VRTAVAWYQQKPGQPPKLLIYSASYRYT |
| | GYIHSSGTTNYSPSLRSRLSITRDTSK | GVPDRFTGSGSGTDFTFTIISVQAEDLAVY |
| | NQFFLQLNSVTTEDTATYYCTRQLG | YCQQHYTTPYSFGSGTKLEIKRADAAPTV |
| | LKAMEYWGQGTTLTVSSAKTTAPS | SIFPPSSEQLTSGGASVVCFLNNFYPKDIN |
| | VYPLAPVCGDTTGSSVTLGCLVKG | VKWKIDGSERQNGVLNSWTDQDSKDST |
| | YFPEPVTLTWNSGSLSSGVHTFPAV | YSMSSTLTLTKDEYERHNSYTCEATHKTS |
| | LQSDLYTLSSSVTVTSSTWPSQSITC | TSPIVKSFNRNEC (SEQ ID NO: 11) |
| | NVAHPASSTKVDKKIEPRGPTIKPCP | |
| | PCKCPAPNLLGGPSVFIFPPKIKDVL | |
| | MISLSPIVTCVVVDVSEDDPDVQIS | |
| | WFVNNVEVHTAQTQTHREDYNSTL | |
| | RVVSALPIQHQDWMSGKEFKCKVN | |
| | NKDLPAPIERTISKPKGSVRAPQVYV | |
| | LPPPEEEMTKKQVTLTCMVTDFMPE | |
| | DIYVEWTNNGKTELNYKNTEPVLD | |
| | SDGSYFMYSKLRVEKKNWVERNSY | |
| | SCSVVHEGLHNHHTTKSFSRTPGK | |
| | (SEQ ID NO: 10) | |
| I23RB149 | DVQLQESGPDLVKPSQSLSLTCTVT | DVQMIQSPLSLPVSLGDQASISCRSSQSLV |
| | GYSITSGYNWHWIRQFPGNKLEWM | HSNGNTYLHWYLQKPGQSPKLLIYKVSN |
| | GYIHFSDRTNYNPSLKSRISITRDTSK | RFSGVPDRFSGSGSGTDFTLKISRVEAEDL |
| | NQFFLQLNSVTSEDTATYYCSRQLG | GVYFCSQSTHVPLTFGAGTRLEIKRADAA |
| | LKALDYWGQGTTLTVSSAKTTAPS | PTVSIFPPSSEQLTSGGASVVCFLNNFYPK |
| | VYPLAPVCGDTTGSSVTLGCLVKG | DINVKWKIDGSERQNGVLNSWTDQDSKD |
| | YFPEPVTLTWNSGSLSSGVHTFPAV | STYSMSSTLTLTKDEYERHNSYTCEATHK |
| | LQSDLYTLSSSVTVTSSTWPSQSITC | TSTSPIVKSFNRNEC (SEQ ID NO: 13) |
| | NVAHPASSTKVDKKIEPRGPTIKPCP | |
| | PCKCPAPNLLGGPSVFIFPPKIKDVL | |
| | MISLSPIVTCVVVDVSEDDPDVQIS | |
| | WFVNNVEVHTAQTQTHREDYNSTL | |
| | RVVSALPIQHQDWMSGKEFKCKVN | |
| | NKDLPAPIERTISKPKGSVRAPQVYV | |
| | LPPPEEEMTKKQVTLTCMVTDFMPE | |
| | DIYVEWTNNGKTELNYKNTEPVLD | |
| | SDGSYFMYSKLRVEKKNWVERNSY | |
| | SCSVVHEGLHNHHTTKSFSRTPGK | |
| | (SEQ ID NO: 12) | |
| I23RB150 | QIQLVQSGPELKKPGETVKISCKASA | DIVMTQSHKFMSTSVGGRVSITCKASQD |
| | YTFTNYGMNWVKQAPGKGLKWM | VSTAVAWYQQKPGQSPRLLIYSASYRYT |
| | GWIKTNTGEPTYAEEFKGRFAFSLE | GVPDRFTGSGSGTDFTFTISSVQAEDLAV |
| | TSASTAYLQINNLKNEDTATYFCAR | FYCQQHYSTPYTFGSGTRLEIKRADAAPT |
| | SRQLGLRYYFDYWGQGTTLTVSSA | VSIFPPSSEQLTSGGASVVCFLNNFYPKDI |
| | KTTAPSVYPLAPVCGDTTGSSVTLG | NVKWKIDGSERQNGVLNSWTDQDSKDS |
| | CLVKGYFPEPVTLTWNSGSLSSGVH | TYSMSSTLTLTKDEYERHNSYTCEATHKT |
| | TFPAVLQSDLYTLSSSVTVTSSTWPS | STSPIVKSFNRNEC (SEQ ID NO: 15) |
| | QSITCNVAHPASSTKVDKKIEPRGPT | |
| | IKPCPPCKCPAPNLLGGPSVFIFPPKI | |
| | KDVLMISLSPIVTCVVVDVSEDDPD | |
| | VQISWFVNNVEVHTAQTQTHREDY | |
| | NSTLRVVSALPIQHQDWMSGKEFK | |
| | CKVNNKDLPAPIERTISKPKGSVRAP | |
| | QVYVLPPPEEEMTKKQVTLTCMVT | |
| | DFMPEDIYVEWTNNGKTELNYKNT | |
| | EPVLDSDGSYFMYSKLRVEKKNWV | |
| | ERNSYSCSVVHEGLHNHHTTKSFSR | |
| | TPGK (SEQ ID NO: 14) | |
| I23RB153 | EVKLVESGGGLVQPGGSLKLSCAAS | DIVMTQSHRFMSTSVGERVSITCKASQDV |
| | GFTFSSDTMSWVRQTPEKRLELVAE | GNAVAWYQQKPGQSPKLLIYWTSTRHN |
| | ISSNGGSTYHIDTVKGRFTISRDNAK | GVPDRFTGSGSGTDFTLTISNVQGEDLAD |
| | NTLYLQMSSLKSEDTAMYYCASPG | YFCQQYNRYPLTFGSGTKLEIKRADAAPT |
| | YPWFAYWGQGTTVTVSAAKTTAPS | VSIFPPSSEQLTSGGASVVCFLNNFYPKDI |
| | VYPLAPVCGDTTGSSVTLGCLVKG | NVKWKIDGSERQNGVLNSWTDQDSKDS |
| | YFPEPVTLTWNSGSLSSGVHTFPAV | TYSMSSTLTLTKDEYERHNSYTCEATHKT |
| | LQSDLYTLSSSVTVTSSTWPSQSITC | STSPIVKSFNRNEC (SEQ ID NO: 17) |
| | NVAHPASSTKVDKKIEPRGPTIKPCP | |
| | PCKCPAPNLLGGPSVFIFPPKIKDVL | |
| | MISLSPIVTCVVVDVSEDDPDVQIS | |
| | WFVNNVEVHTAQTQTHREDYNSTL | |
| | RVVSALPIQHQDWMSGKEFKCKVN | |
| | NKDLPAPIERTISKPKGSVRAPQVYV | |
| | LPPPEEEMTKKQVTLTCMVTDFMPE | |
| | DIYVEWTNNGKTELNYKNTEPVLD | |
| | SDGSYFMYSKLRVEKKNWVERNSY | |
| | SCSVVHEGLHNHHTTKSFSRTPGK | |
| | (SEQ ID NO: 16) | |
| I23RB155 | QVQLKESGPGLVKPSQSLSLTCSVT | QIVLSQSPASLAVSLGQRATISCRTSESVD |
| | GYSITSGHSWNWIRQFPGNKLEWM | TYGNSFIYWYQQKPGQPPKLLIYRASNLE |
| | GYISYDGTNDYNPSLKNRISITRDTS | SGIPARFSGSGSRTDFTLTINPVEADDVAT |
| | KNQFFLNLNSVTTEDTVTYYCARG | YYCQQGNKDPYTFGSGTKLEMKRADAA |
| | GGYYGGTYRVFADWGQGTTLTVSS | PTVSIFPPSSEQLTSGGASVVCFLNNFYPK |
| | AKTTAPSVYPLAPVCGDTTGSSVTL | DINVKWKIDGSERQNGVLNSWTDQDSKD |
| | GCLVKGYFPEPVTLTWNSGSLSSGV | STYSMSSTLTLTKDEYERHNSYTCEATHK |
| | HTFPAVLQSDLYTLSSSVTVTSSTW | TSTSPIVKSFNRNEC (SEQ ID NO: 19) |
| | PSQSITCNVAHPASSTKVDKKIEPRG | |
| | PTIKPCPPCKCPAPNLLGGPSVFIFPP | |
| | KIKDVLMISLSPIVTCVVVDVSEDDP | |
| | DVQISWFVNNVEVHTAQTQTHRED | |
| | YNSTLRVVSALPIQHQDWMSGKEF | |
| | KCKVNNKDLPAPIERTISKPKGSVR | |
| | APQVYVLPPPEEEMTKKQVTLTCM | |
| | VTDFMPEDIYVEWTNNGKTELNYK | |
| | NTEPVLDSDGSYFMYSKLRVEKKN | |
| | WVERNSYSCSVVHEGLHNHHTTKS | |
| | FSRTPGK (SEQ ID NO: 18) | |
| I23RB156 | QVQLKESGPGLVAPSQSLSITCTVSG | DIVMTQSHKFMSTSVGDRVSITCKASQD |
| | FSLTSYAINWVRQPPGKGLEWLGVI | VSTAVAWYQQKPGRSPKLLIYSAFYRYT |
| | WTGGGTNYNSVFKSRLSISKDNSKS | GVPDRFTGSGSGTDFTFTIGSVQAEDLAV |
| | QIFLKMISLQTDDTARYYCARNRDY | YYCQQHYSIPLTFGAGTKLELKRADAAPT |
| | SNYRWYFDVWGAGTTLTVSSAKTT | VSIFPPSSEQLTSGGASVVCFLNNFYPKDI |
| | APSVYPLAPVCGDTTGSSVTLGCLV | NVKWKIDGSERQNGVLNSWTDQDSKDS |
| | KGYFPEPVTLTWNSGSLSSGVHTFP | TYSMSSTLTLTKDEYERHNSYTCEATHKT |
| | AVLQSDLYTLSSSVTVTSSTWPSQSI | STSPIVKSFNRNEC (SEQ ID NO: 21) |
| | TCNVAHPASSTKVDKKIEPRGPTIKP | |
| | CPPCKCPAPNLLGGPSVFIFPPKIKD | |
| | VLMISLSPIVTCVVVDVSEDDPDVQI | |
| | SWFVNNVEVHTAQTQTHREDYNST | |
| | LRVVSALPIQHQDWMSGKEFKCKV | |
| | NNKDLPAPIERTISKPKGSVRAPQVY | |
| | VLPPPEEEMTKKQVTLTCMVTDFM | |
| | PEDIYVEWTNNGKTELNYKNTEPVL | |
| | DSDGSYFMYSKLRVEKKNWVERNS | |
| | YSCSVVHEGLHNHHTTKSFSRTPGK | |
| | (SEQ ID NO: 20) | |
| I23RB157 | EVKLVESGGGSVKPGGSLKLSCAAS | DIVMTQSPASLAVSLGQRATISCRASESV |
| | GFTFSRYTMSWVRQTPEKRLEWVA | DNYGISFMNWFQQKPGQPPKLLIYAASN |
| | YISTGGGDTYYPDSVKGRFTISRDN | QGSGVPARFSGSGSGTDFSLNIHPMEEDD |
| | ARNTLYLQMSSLRSEDTAMYYCAR | TAMYFCQQSKEVPWTFGAGTKLELKRA |
| | RTSYSYYNYVFDYWGQGTTLTVSS | DAAPTVSIFPPSSEQLTSGGASVVCFLNNF |
| | AKTTAPSVYPLAPVCGDTTGSSVTL | YPKDINVKWKIDGSERQNGVLNSWTDQD |
| | GCLVKGYFPEPVTLTWNSGSLSSGV | SKDSTYSMSSTLTLTKDEYERHNSYTCEA |
| | HTFPAVLQSDLYTLSSSVTVTSSTW | THKTSTSPIVKSFNRNEC (SEQ ID NO: 23) |
| | PSQSITCNVAHPASSTKVDKKIEPRG | |
| | PTIKPCPPCKCPAPNLLGGPSVFIFPP | |
| | KIKDVLMISLSPIVTCVVVDVSEDDP | |
| | DVQISWFVNNVEVHTAQTQTHRED | |
| | YNSTLRVVSALPIQHQDWMSGKEF | |
| | KCKVNNKDLPAPIERTISKPKGSVR | |
| | APQVYVLPPPEEEMTKKQVTLTCM | |
| | VTDFMPEDIYVEWTNNGKTELNYK | |
| | NTEPVLDSDGSYFMYSKLRVEKKN | |
| | WVERNSYSCSVVHEGLHNHHTTKS | |
| | FSRTPGK (SEQ ID NO: 22) | |
| I23RB159 | EVQLQQSGGGLVKPGGSLKLSCAA | DIVMTQTTSSLSASLGDRVTISCRASQDIS |
| | SGFTFSDYGMAWVRQTPRKGPEWI | NYLNWYQQKPDGTVKLLIYYTSRLHSGV |
| | AFISNLAYSVYYSDTVTGRFTISREN | PSRFSGSGSGTDYSLTISNLEQEDIATYFC |
| | AKNTLYLEMSSLRSEDTAMYYCAR | QQGNTLPWTFGAGTKLELKRADAAPTVS |
| | HGDYRNYGFAYWGLGTTVTVSSAK | IFPPSSEQLTSGGASVVCFLNNFYPKDINV |
| | TTAPSVYPLAPVCGDTTGSSVTLGC | KWKIDGSERQNGVLNSWTDQDSKDSTYS |
| | LVKGYFPEPVTLTWNSGSLSSGVHT | MSSTLTLTKDEYERHNSYTCEATHKTSTS |
| | FPAVLQSDLYTLSSSVTVTSSTWPSQ | PIVKSFNRNEC (SEQ ID NO: 25) |
| | SITCNVAHPASSTKVDKKIEPRGPTI | |
| | KPCPPCKCPAPNLLGGPSVFIFPPKIK | |
| | DVLMISLSPIVTCVVVDVSEDDPDV | |
| | QISWFVNNVEVHTAQTQTHREDYN | |
| | STLRVVSALPIQHQDWMSGKEFKC | |
| | KVNNKDLPAPIERTISKPKGSVRAPQ | |
| | VYVLPPPEEEMTKKQVTLTCMVTD | |
| | FMPEDIYVEWTNNGKTELNYKNTE | |
| | PVLDSDGSYFMYSKLRVEKKNWVE | |
| | RNSYSCSVVHEGLHNHHTTKSFSRT | |
| | PGK (SEQ ID NO: 24) | |
| I23RB160 | QVQLKESGPDLVKPSQSLSLTCTVT | DIVMTQSHKFMSTSVGDRVSITCKASQD |
| | GYSITSGYNWHWIRQFPGNKLEWM | VRTAVAWYQQKPGQSPKLLIHSASYRYT |
| | GYIHYSSGTIYNPSLKSRISITRDTSK | GVPDRFTGSGSGTDFTFTISSVQVEDLAV |
| | NQFFLQLNSVTTEDTGTYYCARQLG | YYCQQHYTTPYTFGSGTKLEIKRADAAPT |
| | LKAMDYWGQGTSVTVSSAKTTAPS | VSIFPPSSEQLTSGGASVVCFLNNFYPKDI |
| | VYPLAPVCGDTTGSSVTLGCLVKG | NVKWKIDGSERQNGVLNSWTDQDSKDS |
| | YFPEPVTLTWNSGSLSSGVHTFPAV | TYSMSSTLTLTKDEYERHNSYTCEATHKT |
| | LQSDLYTLSSSVTVTSSTWPSQSITC | STSPIVKSFNRNEC (SEQ ID NO: 27) |
| | NVAHPASSTKVDKKIEPRGPTIKPCP | |
| | PCKCPAPNLLGGPSVFIFPPKIKDVL | |
| | MISLSPIVTCVVVDVSEDDPDVQIS | |
| | WFVNNVEVHTAQTQTHREDYNSTL | |
| | RVVSALPIQHQDWMSGKEFKCKVN | |
| | NKDLPAPIERTISKPKGSVRAPQVYV | |
| | LPPPEEEMTKKQVTLTCMVTDFMPE | |
| | DIYVEWTNNGKTELNYKNTEPVLD | |
| | SDGSYFMYSKLRVEKKNWVERNSY | |
| | SCSVVHEGLHNHHTTKSFSRTPGK | |
| | (SEQ ID NO: 26) | |
| I23RB161 | EFQLQQSGPELVKPGASVKISCKAS | DIVMTQSPAILSASPGEKVTMTCRASSSV |
| | VYAFSSSWMNWVKQRPGKGLEWI | SYMHWYQQKPGSSPKPWIYATSDLASGA |
| | GRIYPGDGDTNYNGKFKGKATLTA | PARFSGSGSGTSYSLTISRVEAEDAATYY |
| | DKSSSTAYMQLSSLTSEDSAVYFCA | CQQWSSNPPTFGGGTKLEIKRADAAPTVS |
| | RRYDFGSAMDYWGQGTSVTVSSAK | IFPPSSEQLTSGGASVVCFLNNFYPKDINV |
| | TTAPSVYPLAPVCGDTTGSSVTLGC | KWKIDGSERQNGVLNSWTDQDSKDSTYS |
| | LVKGYFPEPVTLTWNSGSLSSGVHT | MSSTLTLTKDEYERHNSYTCEATHKTSTS |
| | FPAVLQSDLYTLSSSVTVTSSTWPSQ | PIVKSFNRNEC (SEQ ID NO: 29) |
| | SITCNVAHPASSTKVDKKIEPRGPTI | |
| | KPCPPCKCPAPNLLGGPSVFIFPPKIK | |
| | DVLMISLSPIVTCVVVDVSEDDPDV | |
| | QISWFVNNVEVHTAQTQTHREDYN | |
| | STLRVVSALPIQHQDWMSGKEFKC | |
| | KVNNKDLPAPIERTISKPKGSVRAPQ | |
| | VYVLPPPEEEMTKKQVTLTCMVTD | |
| | FMPEDIYVEWTNNGKTELNYKNTE | |
| | PVLDSDGSYFMYSKLRVEKKNWVE | |
| | RNSYSCSVVHEGLHNHHTTKSFSRT | |
| | PGK (SEQ ID NO: 28) | |
| I23RB162 | EFQLQQSGPELVKPGASVKMSCKAS | DIVMTQSQKFMSTSVGDRVSVTCKASQN |
| | GYTFTNYVMHWVKQKPGQGLEWI | VGTNVAWYQQKPGQSPKALIYSASYRYS |
| | GYINPYNDGTKYNEKFKGKATLTS | GVPDRFTGSGSGTDFTLTISNVQSEDLAE |
| | DKSSSTAYMELSSLTSEDSAVYYCA | YFCQQYNSYPFTFGSGTKLEIKRADAAPT |
| | RSRTGTRWYFDVWGAGTTVTVSSA | VSIFPPSSEQLTSGGASVVCFLNNFYPKDI |
| | KTTAPSVYPLAPVCGDTTGSSVTLG | NVKWKIDGSERQNGVLNSWTDQDSKDS |
| | CLVKGYFPEPVTLTWNSGSLSSGVH | TYSMSSTLTLTKDEYERHNSYTCEATHKT |
| | TFPAVLQSDLYTLSSSVTVTSSTWPS | STSPIVKSFNRNEC (SEQ ID NO: 31) |
| | QSITCNVAHPASSTKVDKKIEPRGPT | |
| | IKPCPPCKCPAPNLLGGPSVFIFPPKI | |
| | KDVLMISLSPIVTCVVVDVSEDDPD | |
| | VQISWFVNNVEVHTAQTQTHREDY | |
| | NSTLRVVSALPIQHQDWMSGKEFK | |
| | CKVNNKDLPAPIERTISKPKGSVRAP | |
| | QVYVLPPPEEEMTKKQVTLTCMVT | |
| | DFMPEDIYVEWTNNGKTELNYKNT | |
| | EPVLDSDGSYFMYSKLRVEKKNWV | |
| | ERNSYSCSVVHEGLHNHHTTKSFSR | |
| | TPGK (SEQ ID NO: 30) | |
| I23RB165 | EVQLQQSGAELVRPGASVKLSCTAS | DIVMTQSPASLAVSLGQRATISCRASKSV |
| | GFNIKDSLMHWVKQRPEQGLEWIG | STSGYSYMHWYQQKPGQPPKLLIYLASN |
| | WIDPEDGKTKYAPKFQDKATITADT | LESGVPARFSGSGSGTDFTLNIHPVEEEDA |
| | SSNTAYLQLSSLTSEDTAIYYCARRE | ATYYCQHSRELPLTFGAGTKLEMKRADA |
| | VLDYFDYWGQGTTLTVSSAKTTAP | APTVSIFPPSSEQLTSGGASVVCFLNNFYP |
| | SVYPLAPVCGDTTGSSVTLGCLVKG | KDINVKWKIDGSERQNGVLNSWTDQDSK |
| | YFPEPVTLTWNSGSLSSGVHTFPAV | DSTYSMSSTLTLTKDEYERHNSYTCEATH |
| | LQSDLYTLSSSVTVTSSTWPSQSITC | KTSTSPIVKSFNRNEC (SEQ ID NO: 33) |
| | NVAHPASSTKVDKKIEPRGPTIKPCP | |
| | PCKCPAPNLLGGPSVFIFPPKIKDVL | |
| | MISLSPIVTCVVVDVSEDDPDVQIS | |
| | WFVNNVEVHTAQTQTHREDYNSTL | |
| | RVVSALPIQHQDWMSGKEFKCKVN | |
| | NKDLPAPIERTISKPKGSVRAPQVYV | |
| | LPPPEEEMTKKQVTLTCMVTDFMPE | |
| | DIYVEWTNNGKTELNYKNTEPVLD | |
| | SDGSYFMYSKLRVEKKNWVERNSY | |
| | SCSVVHEGLHNHHTTKSFSRTPGK | |
| | (SEQ ID NO: 32) | |
| I23RB166 | DVQLQESGPGLVKPSQTVSLTCTVT | DIVMTQSHKFMSTSVGARVSITCKASQD |
| | GYSITNGNHWWNWIRQVSGSKLEW | VSTAVAWYQQKPGQSPKLLIYSASYRYT |
| | IGYIRSSGSTDSNPSLKSRISITRDTSK | GVPDRFTGSGSGTDFTFTISSVQAEDLAV |
| | NQLFLQLNSVTAEDIATYYCARERL | YYCQQHYSTPRTFGGGTKLEIKRADAAP |
| | RLRWSYFDYWGQGTTLTVSSAKTT | TVSIFPPSSEQLTSGGASVVCFLNNFYPKD |
| | APSVYPLAPVCGDTTGSSVTLGCLV | INVKWKIDGSERQNGVLNSWTDQDSKDS |
| | KGYFPEPVTLTWNSGSLSSGVHTFP | TYSMSSTLTLTKDEYERHNSYTCEATHKT |
| | AVLQSDLYTLSSSVTVTSSTWPSQSI | STSPIVKSFNRNEC (SEQ ID NO: 35) |
| | TCNVAHPASSTKVDKKIEPRGPTIKP | |
| | CPPCKCPAPNLLGGPSVFIFPPKIKD | |
| | VLMISLSPIVTCVVVDVSEDDPDVQI | |
| | SWFVNNVEVHTAQTQTHREDYNST | |
| | LRVVSALPIQHQDWMSGKEFKCKV | |
| | NNKDLPAPIERTISKPKGSVRAPQVY | |
| | VLPPPEEEMTKKQVTLTCMVTDFM | |
| | PEDIYVEWTNNGKTELNYKNTEPVL | |
| | DSDGSYFMYSKLRVEKKNWVERNS | |
| | YSCSVVHEGLHNHHTTKSFSRTPGK | |
| | (SEQ ID NO: 34) | |
| I23RB168 | QIQLVQSGPELVKPGASVKMSCKTS | DIQMTQSSSSFSVSLGDRVTITCKASEDLY |
| | GYTFTDYYINWVKQRPGQGLEWIG | NRLAWYQQKPGNAPRLLISGATSLGTGV |
| | WIYPAINNTNYNEKFKGKATLTVDT | LSRFSGSGSGKDYTLSITSLQTEDVATYY |
| | SSRTAYMQLNSLTSEDSAVYFCAIS | CQQYWSIPWTFGAGTKLELKRADAAPTV |
| | RKPYFDYWGQGTTLTVSSAKTTAPS | SIFPPSSEQLTSGGASVVCFLNNFYPKDIN |
| | VYPLAPVCGDTTGSSVTLGCLVKG | VKWKIDGSERQNGVLNSWTDQDSKDST |
| | YFPEPVTLTWNSGSLSSGVHTFPAV | YSMSSTLTLTKDEYERHNSYTCEATHKTS |
| | LQSDLYTLSSSVTVTSSTWPSQSITC | TSPIVKSFNRNEC (SEQ ID NO: 37) |
| | NVAHPASSTKVDKKIEPRGPTIKPCP | |
| | PCKCPAPNLLGGPSVFIFPPKIKDVL | |
| | MISLSPIVTCVVVDVSEDDPDVQIS | |
| | WFVNNVEVHTAQTQTHREDYNSTL | |
| | RVVSALPIQHQDWMSGKEFKCKVN | |
| | NKDLPAPIERTISKPKGSVRAPQVYV | |
| | LPPPEEEMTKKQVTLTCMVTDFMPE | |
| | DIYVEWTNNGKTELNYKNTEPVLD | |
| | SDGSYFMYSKLRVEKKNWVERNSY | |
| | SCSVVHEGLHNHHTTKSFSRTPGK | |
| | (SEQ ID NO: 36) | |
| I23RB169 | QIQLVQSGPELKKPGETVKISCKASG | DIKMTQSPASLAVSLGQRATISCRASKSV |
| | YTFTTVGMQWVQKMPGKGFKWIG | STSDYSYMHWYQQKPGQPPKLLIYLASN |
| | WINTHSGEPKYTDDFKGRFAFSLET | LESGVPARFSGSGSGTDFTLNIHPVEEEDA |
| | SASTAYLQISNLKSEDTATYFCARSS | ATYYCQHSRELPRTFGAGTKLELKRADA |
| | ALTGAFAYWGQGTLVTVSSAKTTA | APTVSIFPPSSEQLTSGGASVVCFLNNFYP |
| | PSVYPLAPVCGDTTGSSVTLGCLVK | KDINVKWKIDGSERQNGVLNSWTDQDSK |
| | GYFPEPVTLTWNSGSLSSGVHTFPA | DSTYSMSSTLTLTKDEYERHNSYTCEATH |
| | VLQSDLYTLSSSVTVTSSTWPSQSIT | KTSTSPIVKSFNRNEC (SEQ ID NO: 39) |
| | CNVAHPASSTKVDKKIEPRGPTIKPC | |
| | PPCKCPAPNLLGGPSVFIFPPKIKDV | |
| | LMISLSPIVTCVVVDVSEDDPDVQIS | |
| | WFVNNVEVHTAQTQTHREDYNSTL | |
| | RVVSALPIQHQDWMSGKEFKCKVN | |
| | NKDLPAPIERTISKPKGSVRAPQVYV | |
| | LPPPEEEMTKKQVTLTCMVTDFMPE | |
| | DIYVEWTNNGKTELNYKNTEPVLD | |
| | SDGSYFMYSKLRVEKKNWVERNSY | |
| | SCSVVHEGLHNHHTTKSFSRTPGK | |
| | (SEQ ID NO: 38) | |
| I23RB173 | DVQLQESGPGLVKPSQSLSLTCSVT | DIKMTQSPAIMSASPGEKVTITCSASSSVS |
| | GYSITSGYYWNWIRQFPGNKLEWM | YMHWFQQKPGTSPKLWIYSTSNLASGVP |
| | GYISYDGGNNYNPSLKNRISITRDTS | ARFSGSGSGTSYSLTISRMEAEDAATYYC |
| | KNQFFLKLNSVTTEDTATYYCARD | QQRSSYPLTFGDGTKLEMKRADAAPTVSI |
| | AGLLPYYAMDYWGQGTTLTVSSAK | FPPSSEQLTSGGASVVCFLNNFYPKDINV |
| | TTAPSVYPLAPVCGDTTGSSVTLGC | KWKIDGSERQNGVLNSWTDQDSKDSTYS |
| | LVKGYFPEPVTLTWNSGSLSSGVHT | MSSTLTLTKDEYERHNSYTCEATHKTSTS |
| | FPAVLQSDLYTLSSSVTVTSSTWPSQ | PIVKSFNRNEC (SEQ ID NO: 41) |
| | SITCNVAHPASSTKVDKKIEPRGPTI | |
| | KPCPPCKCPAPNLLGGPSVFIFPPKIK | |
| | DVLMISLSPIVTCVVVDVSEDDPDV | |
| | QISWFVNNVEVHTAQTQTHREDYN | |
| | STLRVVSALPIQHQDWMSGKEFKC | |
| | KVNNKDLPAPIERTISKPKGSVRAPQ | |
| | VYVLPPPEEEMTKKQVTLTCMVTD | |
| | FMPEDIYVEWTNNGKTELNYKNTE | |
| | PVLDSDGSYFMYSKLRVEKKNWVE | |
| | RNSYSCSVVHEGLHNHHTTKSFSRT | |
| | PGK (SEQ ID NO: 40) | |
| I23RB177 | EVQLQQSGPELLKPGASVKISCKAS | NTQMTQSPSSMYASLGERVTITCKASQDI |
| | GYTITDYTMHWVKQSHGKSLEWIG | NSYLSWFQQKPGKSPKALIYRANRLVDG |
| | GINPNYGGTSYNEKFKDKATLTVD | VPSRFSGSGSGQDYSLTISSLEYEDMGIYY |
| | KSSSTAYMELRSLTSEDSAVFYCVR | CQQYDEFPRTFGAGTKLELKRADAAPTV |
| | GNIYFDYWGQGTTLTVSSAKTTAPS | SIFPPSSEQLTSGGASVVCFLNNFYPKDIN |
| | VYPLAPVCGDTTGSSVTLGCLVKG | VKWKIDGSERQNGVLNSWTDQDSKDST |
| | YFPEPVTLTWNSGSLSSGVHTFPAV | YSMSSTLTLTKDEYERHNSYTCEATHKTS |
| | LQSDLYTLSSSVTVTSSTWPSQSITC | TSPIVKSFNRNEC (SEQ ID NO: 43) |
| | NVAHPASSTKVDKKIEPRGPTIKPCP | |
| | PCKCPAPNLLGGPSVFIFPPKIKDVL | |
| | MISLSPIVTCVVVDVSEDDPDVQIS | |
| | WFVNNVEVHTAQTQTHREDYNSTL | |
| | RVVSALPIQHQDWMSGKEFKCKVN | |
| | NKDLPAPIERTISKPKGSVRAPQVYV | |
| | LPPPEEEMTKKQVTLTCMVTDFMPE | |
| | DIYVEWTNNGKTELNYKNTEPVLD | |
| | SDGSYFMYSKLRVEKKNWVERNSY | |
| | SCSVVHEGLHNHHTTKSFSRTPGK | |
| | (SEQ ID NO: 42) | |
| I23RB180 | QVTLKESGPGILQPSQTLSLTCSFSG | DIQMTQSPASLSASVGETVTITCRASVNIH |
| | FSLSTYGMGVGWIRQPSGKGLEWL | NYLAWYQQKQGKSPQLLVYNAKTLADG |
| | ANIWWNDSKYHNAALKSRLTISKD | VPSRFSGSGSGTQYSLKINSLQPEDFGSYY |
| | TSKNQVFLKIASVDTADTATYYCGR | CQHFWTTPYMYTFGAGTKLELKRADAA |
| | IDGYYECVDVWGTGTSVTVSSAKT | PTVSIFPPSSEQLTSGGASVVCFLNNFYPK |
| | TAPSVYPLAPVCGDTTGSSVTLGCL | DINVKWKIDGSERQNGVLNSWTDQDSKD |
| | VKGYFPEPVTLTWNSGSLSSGVHTF | STYSMSSTLTLTKDEYERHNSYTCEATHK |
| | PAVLQSDLYTLSSSVTVTSSTWPSQS | TSTSPIVKSFNRNEC (SEQ ID NO: 45) |
| | ITCNVAHPASSTKVDKKIEPRGPTIK | |
| | PCPPCKCPAPNLLGGPSVFIFPPKIKD | |
| | VLMISLSPIVTCVVVDVSEDDPDVQI | |
| | SWFVNNVEVHTAQTQTHREDYNST | |
| | LRVVSALPIQHQDWMSGKEFKCKV | |
| | NNKDLPAPIERTISKPKGSVRAPQVY | |
| | VLPPPEEEMTKKQVTLTCMVTDFM | |
| | PEDIYVEWTNNGKTELNYKNTEPVL | |
| | DSDGSYFMYSKLRVEKKNWVERNS | |
| | YSCSVVHEGLHNHHTTKSFSRTPGK | |
| | (SEQ ID NO: 44) | |
| I23RB182 | EVQLQQSGPGLVKPSQSLSLTCSVT | DIVMTQSPAIMSASLGEKVTMSCRASSSV |
| | GYSITSGYFWNWLRQFPGSKLEWM | NYMYWYQQKSDASPKLWIYYTSNLAPG |
| | GFIDNDGSNDYNPSLKNRISITRDTS | VPARFSGSGSGNSYSLTISSMEGEDAATY |
| | KNQFFLRLNSVTTEDTATYYCARGR | YCQQFTNSPWTFGAGTKLELKRADAAPT |
| | LGFFDSWGPGTTLTVSSAKTTAPSV | VSIFPPSSEQLTSGGASVVCFLNNFYPKDI |
| | YPLAPVCGDTTGSSVTLGCLVKGYF | NVKWKIDGSERQNGVLNSWTDQDSKDS |
| | PEPVTLTWNSGSLSSGVHTFPAVLQ | TYSMSSTLTLTKDEYERHNSYTCEATHKT |
| | SDLYTLSSSVTVTSSTWPSQSITCNV | STSPIVKSFNRNEC (SEQ ID NO: 47) |
| | AHPASSTKVDKKIEPRGPTIKPCPPC | |
| | KCPAPNLLGGPSVFIFPPKIKDVLMI | |
| | SLSPIVTCVVVDVSEDDPDVQISWF | |
| | VNNVEVHTAQTQTHREDYNSTLRV | |
| | VSALPIQHQDWMSGKEFKCKVNNK | |
| | DLPAPIERTISKPKGSVRAPQVYVLP | |
| | PPEEEMTKKQVTLTCMVTDFMPEDI | |
| | YVEWTNNGKTELNYKNTEPVLDSD | |
| | GSYFMYSKLRVEKKNWVERNSYSC | |
| | SVVHEGLHNHHTTKSFSRTPGK | |
| | (SEQ ID NO: 46) | |
| I23RB188 | QIQLVQSGPELKKPGETVKISCKASG | DVQMIQSPSSLSASLGERVSLTCRASQEIS |
| | YTFTNYGMNWVKQAPGKGLKWM | GNLSWLQQKPDGTIKRLIYAASTLDSGVP |
| | GWINTYTGAPTYADDFKGRFAFSLE | KRFSGSRSGSDYSLTISSLESEDFADYYCL |
| | TSASTAYLQINNFKNEDTATYFCAR | QYASYPWTFGAGTRLEIKRADAAPTVSIF |
| | GNGYPYYYGINYWGQGTSVTVSSA | PPSSEQLTSGGASVVCFLNNFYPKDINVK |
| | KTTAPSVYPLAPVCGDTTGSSVTLG | WKIDGSERQNGVLNSWTDQDSKDSTYS |
| | CLVKGYFPEPVTLTWNSGSLSSGVH | MSSTLTLTKDEYERHNSYTCEATHKTSTS |
| | TFPAVLQSDLYTLSSSVTVTSSTWPS | PIVKSFNRNEC (SEQ ID NO: 49) |
| | QSITCNVAHPASSTKVDKKIEPRGPT | |
| | IKPCPPCKCPAPNLLGGPSVFIFPPKI | |
| | KDVLMISLSPIVTCVVVDVSEDDPD | |
| | VQISWFVNNVEVHTAQTQTHREDY | |
| | NSTLRVVSALPIQHQDWMSGKEFK | |
| | CKVNNKDLPAPIERTISKPKGSVRAP | |
| | QVYVLPPPEEEMTKKQVTLTCMVT | |
| | DFMPEDIYVEWTNNGKTELNYKNT | |
| | EPVLDSDGSYFMYSKLRVEKKNWV | |
| | ERNSYSCSVVHEGLHNHHTTKSFSR | |
| | TPGK (SEQ ID NO: 48) | |
| I23RB189 | DVQLQESGPDLVKPSQSLSLTCTVT | DIVLTQSPKSMSMSVGERVTLSCKASENV |
| | GYSITSGYNWHWIRQFPGNKLEWM | GTYVSWYQQKPEQSPKLLMYGASNRYT |
| | GYIHSSGTTNYSPSLRSRLSITRDTSK | GVPDRFTGSGSATDFTLTISSVQAEDLAD |
| | NQFFLQLNSVTTEDTATYYCTRQLG | YHCGQSYSYPPTFGGGTKLEIKRADAAPT |
| | LKAMEYWGQGTTLTVSSAKTTAPS | VSIFPPSSEQLTSGGASVVCFLNNFYPKDI |
| | VYPLAPVCGDTTGSSVTLGCLVKG | NVKWKIDGSERQNGVLNSWTDQDSKDS |
| | YFPEPVTLTWNSGSLSSGVHTFPAV | TYSMSSTLTLTKDEYERHNSYTCEATHKT |
| | LQSDLYTLSSSVTVTSSTWPSQSITC | STSPIVKSFNRNEC (SEQ ID NO: 51) |
| | NVAHPASSTKVDKKIEPRGPTIKPCP | |
| | PCKCPAPNLLGGPSVFIFPPKIKDVL | |
| | MISLSPIVTCVVVDVSEDDPDVQIS | |
| | WFVNNVEVHTAQTQTHREDYNSTL | |
| | RVVSALPIQHQDWMSGKEFKCKVN | |
| | NKDLPAPIERTISKPKGSVRAPQVYV | |
| | LPPPEEEMTKKQVTLTCMVTDFMPE | |
| | DIYVEWTNNGKTELNYKNTEPVLD | |
| | SDGSYFMYSKLRVEKKNWVERNSY | |
| | SCSVVHEGLHNHHTTKSFSRTPGK | |
| | (SEQ ID NO: 50) | |
| I23RB27 | QVQLKESGPDLVQPSQTLSLTCTVS | DIQMTQSPTSLAVSLGQRATISCRASESVE |
| | GFSLTSYGVHWVRQPPGKGLEWVG | YYGTSLMHWYQQKPGQPPKLLIYAASNV |
| | TLGWDDKKSYNSALKSRLSISRDTS | ESGVPARFSGSGSGTDFSLNIHPVEEEDIA |
| | KSQVFLKLSSLQTEDTAMYYCTKE | MYFCQQGKKVPWTFGAGTKLEMKRADA |
| | DVSYAMDFWGQGTTLTVSSAKTTA | APTVSIFPPSSEQLTSGGASVVCFLNNFYP |
| | PSVYPLAPVCGDTTGSSVTLGCLVK | KDINVKWKIDGSERQNGVLNSWTDQDSK |
| | GYFPEPVTLTWNSGSLSSGVHTFPA | DSTYSMSSTLTLTKDEYERHNSYTCEATH |
| | VLQSDLYTLSSSVTVTSSTWPSQSIT | KTSTSPIVKSFNRNEC (SEQ ID NO: 53) |
| | CNVAHPASSTKVDKKIEPRGPTIKPC | |
| | PPCKCPAPNLLGGPSVFIFPPKIKDV | |
| | LMISLSPIVTCVVVDVSEDDPDVQIS | |
| | WFVNNVEVHTAQTQTHREDYNSTL | |
| | RVVSALPIQHQDWMSGKEFKCKVN | |
| | NKDLPAPIERTISKPKGSVRAPQVYV | |
| | LPPPEEEMTKKQVTLTCMVTDFMPE | |
| | DIYVEWTNNGKTELNYKNTEPVLD | |
| | SDGSYFMYSKLRVEKKNWVERNSY | |
| | SCSVVHEGLHNHHTTKSFSRTPGK | |
| | (SEQ ID NO: 52) | |
| I23RB30 | QVTLKESGPGILQPSQTLSLTCSFSG | DIVLTQSQRFMSTSVGDRVSITCKASQNIR |
| | FSLSTSGMGVSWIRQPSGKGLEWLA | TAVAWYQQKPGQSPKALIYLPSNRHTGV |
| | HIYWDDDKRYNPSLKSRLTISKDTS | PDRFTGSGSGTDFTLTISNVQSEDLADYF |
| | SNQIFLKITSVDTADTATYYCARRTL | CLQHWNYPLTFGAGTKLELKRADAAPTV |
| | GGPPFDYWGQGTTLTVSSAKTTAPS | SIFPPSSEQLTSGGASVVCFLNNFYPKDIN |
| | VYPLAPVCGDTTGSSVTLGCLVKG | VKWKIDGSERQNGVLNSWTDQDSKDST |
| | YFPEPVTLTWNSGSLSSGVHTFPAV | YSMSSTLTLTKDEYERHNSYTCEATHKTS |
| | LQSDLYTLSSSVTVTSSTWPSQSITC | TSPIVKSFNRNEC (SEQ ID NO: 55) |
| | NVAHPASSTKVDKKIEPRGPTIKPCP | |
| | PCKCPAPNLLGGPSVFIFPPKIKDVL | |
| | MISLSPIVTCVVVDVSEDDPDVQIS | |
| | WFVNNVEVHTAQTQTHREDYNSTL | |
| | RVVSALPIQHQDWMSGKEFKCKVN | |
| | NKDLPAPIERTISKPKGSVRAPQVYV | |
| | LPPPEEEMTKKQVTLTCMVTDFMPE | |
| | DIYVEWTNNGKTELNYKNTEPVLD | |
| | SDGSYFMYSKLRVEKKNWVERNSY | |
| | SCSVVHEGLHNHHTTKSFSRTPGK | |
| | (SEQ ID NO: 54) | |
| I23RB31 | EFQLQQSGAEMVRPGASVKLSCKA | DIVLTQSPATLSVTPGDRVSLSCRASQSIS |
| | SGYTFTGYWMNWVKQRPGQGLEW | DHLHWYQQKSHESPRLLIKFASQSISGIPS |
| | IGKIDPSDTETHYNQNFKDKATLTV | RFSGSGSGSDFTLSIDSVEPEDVGVYYCQ |
| | DKSSSTAYMQLNSLTSEDSAVYYC | NGHSFPLTFGSGTKLEIKRADAAPTVSIFP |
| | ARWGLGRNFAMDYWGQGTTLTVS | PSSEQLTSGGASVVCFLNNFYPKDINVKW |
| | SAKTTAPSVYPLAPVCGDTTGSSVT | KIDGSERQNGVLNSWTDQDSKDSTYSMS |
| | LGCLVKGYFPEPVTLTWNSGSLSSG | STLTLTKDEYERHNSYTCEATHKTSTSPIV |
| | VHTFPAVLQSDLYTLSSSVTVTSST | KSFNRNEC (SEQ ID NO: 57) |
| | WPSQSITCNVAHPASSTKVDKKIEP | |
| | RGPTIKPCPPCKCPAPNLLGGPSVFIF | |
| | PPKIKDVLMISLSPIVTCVVVDVSED | |
| | DPDVQISWFVNNVEVHTAQTQTHR | |
| | EDYNSTLRVVSALPIQHQDWMSGK | |
| | EFKCKVNNKDLPAPIERTISKPKGSV | |
| | RAPQVYVLPPPEEEMTKKQVTLTC | |
| | MVTDFMPEDIYVEWTNNGKTELNY | |
| | KNTEPVLDSDGSYFMYSKLRVEKK | |
| | NWVERNSYSCSVVHEGLHNHHTTK | |
| | SFSRTPGK (SEQ ID NO: 56) | |
| I23RB32 | EFQLQQSGPELVKPGASVKLSCKAS | DIVMTQSPSSLTVTAGEKVTMSCKSSQSL |
| | GYTFTDYALHWVKQSPGQGLEWIG | LNSGNQKNYLTWYQQKPGQPPKLLIYW |
| | WIYPGGGNTYYNDKFKGKATMTA | ASTRESGVPDRFTGSGSGTDFTLTISSVQA |
| | DKSSSTAYMQLSSLTSEDSAVYFCA | EDLAVYYCQNDYTYPLTFGSGTKLEIKR |
| | RGRLRRDYPMDYWGQGTSVTVSSA | ADAAPTVSIFPPSSEQLTSGGASVVCFLNN |
| | KTTAPSVYPLAPVCGDTTGSSVTLG | FYPKDINVKWKIDGSERQNGVLNSWTDQ |
| | CLVKGYFPEPVTLTWNSGSLSSGVH | DSKDSTYSMSSTLTLTKDEYERHNSYTCE |
| | TFPAVLQSDLYTLSSSVTVTSSTWPS | ATHKTSTSPIVKSFNRNEC (SEQ ID NO: 59) |
| | QSITCNVAHPASSTKVDKKIEPRGPT | |
| | IKPCPPCKCPAPNLLGGPSVFIFPPKI | |
| | KDVLMISLSPIVTCVVVDVSEDDPD | |
| | VQISWFVNNVEVHTAQTQTHREDY | |
| | NSTLRVVSALPIQHQDWMSGKEFK | |
| | CKVNNKDLPAPIERTISKPKGSVRAP | |
| | QVYVLPPPEEEMTKKQVTLTCMVT | |
| | DFMPEDIYVEWTNNGKTELNYKNT | |
| | EPVLDSDGSYFMYSKLRVEKKNWV | |
| | ERNSYSCSVVHEGLHNHHTTKSFSR | |
| | TPGK (SEQ ID NO: 58) | |
| I23RB33 | EVQLQQSGAELVKPGASVKLSCTAS | DIVLTQSPAIMSASPGEKVTMTCRASSSV |
| | GFNIRDIYIHWVKQRPEQGLEWIGRI | RSSYLHWYQQKSGASPKLWIYSTSNLAS |
| | DPANGHSIYAAKFQGKATITADTSL | GVPARFSGSGSGTSYSLTITSVEAEDAAT |
| | NIAYMQLSSLTSGDTAVYYCARGS | YYCQQYTGNPIFTFGSGTKLELKRADAAP |
| | DNDYGRVLAYWGLGTSVTVSSAKT | TVSIFPPSSEQLTSGGASVVCFLNNFYPKD |
| | TAPSVYPLAPVCGDTTGSSVTLGCL | INVKWKIDGSERQNGVLNSWTDQDSKDS |
| | VKGYFPEPVTLTWNSGSLSSGVHTF | TYSMSSTLTLTKDEYERHNSYTCEATHKT |
| | PAVLQSDLYTLSSSVTVTSSTWPSQS | STSPIVKSFNRNEC (SEQ ID NO: 61) |
| | ITCNVAHPASSTKVDKKIEPRGPTIK | |
| | PCPPCKCPAPNLLGGPSVFIFPPKIKD | |
| | VLMISLSPIVTCVVVDVSEDDPDVQI | |
| | SWFVNNVEVHTAQTQTHREDYNST | |
| | LRVVSALPIQHQDWMSGKEFKCKV | |
| | NNKDLPAPIERTISKPKGSVRAPQVY | |
| | VLPPPEEEMTKKQVTLTCMVTDFM | |
| | PEDIYVEWTNNGKTELNYKNTEPVL | |
| | DSDGSYFMYSKLRVEKKNWVERNS | |
| | YSCSVVHEGLHNHHTTKSFSRTPGK | |
| | (SEQ ID NO: 60) | |
| I23RB35 | DVQLQESGPGLVKPSQSLSLTCSVT | DIVLTQSPASLAVSLGQRATISCRASESVD |
| | GYSITSGHNWNWIRQFPGNKLEWL | SYGNSFMHWYQQKPGQPPKLLIYRASNL |
| | GYISYDGSNNYDPSLKNRISITRDTS | ESEIPARFSGRGSGTDFTLTINPVEADDVA |
| | KNQFFLKLNSVTTEDTATYYCARG | TYYCQQSNADPYTFGGGTKLEIKRADAA |
| | GGYFGNSYRVFASWGQGTTVTVSS | PTVSIFPPSSEQLTSGGASVVCFLNNFYPK |
| | AKTTAPSVYPLAPVCGDTTGSSVTL | DINVKWKIDGSERQNGVLNSWTDQDSKD |
| | GCLVKGYFPEPVTLTWNSGSLSSGV | STYSMSSTLTLTKDEYERHNSYTCEATHK |
| | HTFPAVLQSDLYTLSSSVTVTSSTW | TSTSPIVKSFNRNEC (SEQ ID NO: 63) |
| | PSQSITCNVAHPASSTKVDKKIEPRG | |
| | PTIKPCPPCKCPAPNLLGGPSVFIFPP | |
| | KIKDVLMISLSPIVTCVVVDVSEDDP | |
| | DVQISWFVNNVEVHTAQTQTHRED | |
| | YNSTLRVVSALPIQHQDWMSGKEF | |
| | KCKVNNKDLPAPIERTISKPKGSVR | |
| | APQVYVLPPPEEEMTKKQVTLTCM | |
| | VTDFMPEDIYVEWTNNGKTELNYK | |
| | NTEPVLDSDGSYFMYSKLRVEKKN | |
| | WVERNSYSCSVVHEGLHNHHTTKS | |
| | FSRTPGK (SEQ ID NO: 62) | |
| I23RB36 | QIQLVQSGAELVKPGASVKLSCTTS | DIVMTQSPKSMSMSVGERVTLSCKASEN |
| | GFNIKDTYIHWMKQRPEQGLEWIG | VGTSVSWFQQKPEQSPKLLIYGASNRYTG |
| | RIDPANGNTIYASKFQGKATLTTDT | VPDRFTGSGSATDFTLTISSVQAEDLADY |
| | SSNTAYMLLSSLTSGDTAVYYCTRG | HCGQSYSYPRTFGGGTKLEIKRADAAPTV |
| | TSWFAYWGQGTTVTVSSAKTTAPS | SIFPPSSEQLTSGGASVVCFLNNFYPKDIN |
| | VYPLAPVCGDTTGSSVTLGCLVKG | VKWKIDGSERQNGVLNSWTDQDSKDST |
| | YFPEPVTLTWNSGSLSSGVHTFPAV | YSMSSTLTLTKDEYERHNSYTCEATHKTS |
| | LQSDLYTLSSSVTVTSSTWPSQSITC | TSPIVKSFNRNEC (SEQ ID NO: 65) |
| | NVAHPASSTKVDKKIEPRGPTIKPCP | |
| | PCKCPAPNLLGGPSVFIFPPKIKDVL | |
| | MISLSPIVTCVVVDVSEDDPDVQIS | |
| | WFVNNVEVHTAQTQTHREDYNSTL | |
| | RVVSALPIQHQDWMSGKEFKCKVN | |
| | NKDLPAPIERTISKPKGSVRAPQVYV | |
| | LPPPEEEMTKKQVTLTCMVTDFMPE | |
| | DIYVEWTNNGKTELNYKNTEPVLD | |
| | SDGSYFMYSKLRVEKKNWVERNSY | |
| | SCSVVHEGLHNHHTTKSFSRTPGK | |
| | (SEQ ID NO: 64) | |
| I23RB39 | EVQLQQSGPELVKPGAPVKISCKAS | DIQMTQSHKFMSTSVGDRVSITCKASQD |
| | GYTFTNYYIHWVKQRPGQGLEWIG | VSTAVAWYQQKPGQSPKLLIYSAFYRYT |
| | YIYPGNGGTAYNQKFKDKATLTAD | GVPDRFTGSGSGTDFTFTISSVQAEDLAV |
| | NPSSTAYMQLSSLTSEDSAVYFCAR | YYCQQHYSSPRTFGAGTKLELKRADAAP |
| | SRGGSRNYFDYWGQGTTLTVSSAK | TVSIFPPSSEQLTSGGASVVCFLNNFYPKD |
| | TTAPSVYPLAPVCGDTTGSSVTLGC | INVKWKIDGSERQNGVLNSWTDQDSKDS |
| | LVKGYFPEPVTLTWNSGSLSSGVHT | TYSMSSTLTLTKDEYERHNSYTCEATHKT |
| | FPAVLQSDLYTLSSSVTVTSSTWPSQ | STSPIVKSFNRNEC (SEQ ID NO: 67) |
| | SITCNVAHPASSTKVDKKIEPRGPTI | |
| | KPCPPCKCPAPNLLGGPSVFIFPPKIK | |
| | DVLMISLSPIVTCVVVDVSEDDPDV | |
| | QISWFVNNVEVHTAQTQTHREDYN | |
| | STLRVVSALPIQHQDWMSGKEFKC | |
| | KVNNKDLPAPIERTISKPKGSVRAPQ | |
| | VYVLPPPEEEMTKKQVTLTCMVTD | |
| | FMPEDIYVEWTNNGKTELNYKNTE | |
| | PVLDSDGSYFMYSKLRVEKKNWVE | |
| | RNSYSCSVVHEGLHNHHTTKSFSRT | |
| | PGK (SEQ ID NO: 66) | |
| I23RB42 | EVQLQQSGAELVKPGASVKISCKAS | DIVLTQTAPSVPVTPGESVSISCRSSKSLL |
| | GYSFTDYIMNWVKQSHGKSLEWIG | HSNGNTYLYWFLQRPGQSPQLLIYRMSN |
| | NINPYFGFTSYNQEFKGKATLTVDK | LASGVPDRESGSGSGTAFTLRISRVEAED |
| | SSSTAYMLLNSLTSEDSAVYYCSRG | VGVYYCMQHLEYPYTFGSGTRLEIKRAD |
| | SYYGYETFFDYWGQGTTLTVSSAK | AAPTVSIFPPSSEQLTSGGASVVCFLNNFY |
| | TTAPSVYPLAPVCGDTTGSSVTLGC | PKDINVKWKIDGSERQNGVLNSWTDQDS |
| | LVKGYFPEPVTLTWNSGSLSSGVHT | KDSTYSMSSTLTLTKDEYERHNSYTCEAT |
| | FPAVLQSDLYTLSSSVTVTSSTWPSQ | HKTSTSPIVKSFNRNEC (SEQ ID NO: 69) |
| | SITCNVAHPASSTKVDKKIEPRGPTI | |
| | KPCPPCKCPAPNLLGGPSVFIFPPKIK | |
| | DVLMISLSPIVTCVVVDVSEDDPDV | |
| | QISWFVNNVEVHTAQTQTHREDYN | |
| | STLRVVSALPIQHQDWMSGKEFKC | |
| | KVNNKDLPAPIERTISKPKGSVRAPQ | |
| | VYVLPPPEEEMTKKQVTLTCMVTD | |
| | FMPEDIYVEWTNNGKTELNYKNTE | |
| | PVLDSDGSYFMYSKLRVEKKNWVE | |
| | RNSYSCSVVHEGLHNHHTTKSFSRT | |
| | PGK (SEQ ID NO: 68) | |
| I23RB45 | QVTLKESGPGILQPSQTLSLTCSFSG | DIVLTQSQKFISTSVGDRVSITCKASQNVR |
| | FSLSTYGMGVSWIRQPSGKGLEWL | TAVAWYQQKPGQSPKLLIYLPSNRHTGV |
| | AHIYWDDDKRYNPSLKSRLTISKDT | PDRFTGSGSGTVFTLTISNVQSEDQADYF |
| | SNNQVFLKITSVDTADTATYYCAQR | CLQHWNYPLTFGAGTKLELKRADAAPTV |
| | ALPLLGQKAPFDYWGQGTTLTVSS | SIFPPSSEQLTSGGASVVCFLNNFYPKDIN |
| | AKTTAPSVYPLAPVCGDTTGSSVTL | VKWKIDGSERQNGVLNSWTDQDSKDST |
| | GCLVKGYFPEPVTLTWNSGSLSSGV | YSMSSTLTLTKDEYERHNSYTCEATHKTS |
| | HTFPAVLQSDLYTLSSSVTVTSSTW | TSPIVKSFNRNEC (SEQ ID NO: 71) |
| | PSQSITCNVAHPASSTKVDKKIEPRG | |
| | PTIKPCPPCKCPAPNLLGGPSVFIFPP | |
| | KIKDVLMISLSPIVTCVVVDVSEDDP | |
| | DVQISWFVNNVEVHTAQTQTHRED | |
| | YNSTLRVVSALPIQHQDWMSGKEF | |
| | KCKVNNKDLPAPIERTISKPKGSVR | |
| | APQVYVLPPPEEEMTKKQVTLTCM | |
| | VTDFMPEDIYVEWTNNGKTELNYK | |
| | NTEPVLDSDGSYFMYSKLRVEKKN | |
| | WVERNSYSCSVVHEGLHNHHTTKS | |
| | FSRTPGK (SEQ ID NO: 70) | |
| I23RB47 | QVQLKESGPGLVAPSQSLSITCTVSG | DIVLTQSPASQSASLGESVTITCLASQTIGS |
| | FSLTNYDIHWVRQSPGKGLEWLGVI | WLAWYQQKPGKSPQLLIYAATRLADGVP |
| | WSDGRTDYKGAFISRLSISKDNSKS | SRFSGSGSGTKFSFKISSLQAEDFVFYYCH |
| | QVFFKMNSLQADDTAIYYCARNNY | QLYSIPLTFGGGTKLEMKRADAAPTVSIF |
| | YRYGRNTMDYWGQGTSVTVSSAK | PPSSEQLTSGGASVVCFLNNFYPKDINVK |
| | TTAPSVYPLAPVCGDTTGSSVTLGC | WKIDGSERQNGVLNSWTDQDSKDSTYS |
| | LVKGYFPEPVTLTWNSGSLSSGVHT | MSSTLTLTKDEYERHNSYTCEATHKTSTS |
| | FPAVLQSDLYTLSSSVTVTSSTWPSQ | PIVKSFNRNEC (SEQ ID NO: 73) |
| | SITCNVAHPASSTKVDKKIEPRGPTI | |
| | KPCPPCKCPAPNLLGGPSVFIFPPKIK | |
| | DVLMISLSPIVTCVVVDVSEDDPDV | |
| | QISWFVNNVEVHTAQTQTHREDYN | |
| | STLRVVSALPIQHQDWMSGKEFKC | |
| | KVNNKDLPAPIERTISKPKGSVRAPQ | |
| | VYVLPPPEEEMTKKQVTLTCMVTD | |
| | FMPEDIYVEWTNNGKTELNYKNTE | |
| | PVLDSDGSYFMYSKLRVEKKNWVE | |
| | RNSYSCSVVHEGLHNHHTTKSFSRT | |
| | PGK (SEQ ID NO: 72) | |
| I23RB51 | QVQLQQSGPDLVKPSQSLSLTCTVT | DIVLTQSPASLSASVGETVTITCRASGNIH |
| | GYSITSGYNWHWIRQFPGNKLEWM | NYLAWYQHKQGKSPQLLVYNAKTLADG |
| | GYVHYRDSTHYNPSLKSRISITRDTS | VPSRFSGSGSGTQYSLKINSLQPEDFGSYY |
| | KNQFFLQLNSVTTEDTATYYCARQL | CQYFWTTRTFGAGTKLELKRADAAPTVS |
| | GLKAMDYWGQGTSVTVSSAKTTAP | IFPPSSEQLTSGGASVVCFLNNFYPKDINV |
| | SVYPLAPVCGDTTGSSVTLGCLVKG | KWKIDGSERQNGVLNSWTDQDSKDSTYS |
| | YFPEPVTLTWNSGSLSSGVHTFPAV | MSSTLTLTKDEYERHNSYTCEATHKTSTS |
| | LQSDLYTLSSSVTVTSSTWPSQSITC | PIVKSFNRNEC (SEQ ID NO: 75) |
| | NVAHPASSTKVDKKIEPRGPTIKPCP | |
| | PCKCPAPNLLGGPSVFIFPPKIKDVL | |
| | MISLSPIVTCVVVDVSEDDPDVQIS | |
| | WFVNNVEVHTAQTQTHREDYNSTL | |
| | RVVSALPIQHQDWMSGKEFKCKVN | |
| | NKDLPAPIERTISKPKGSVRAPQVYV | |
| | LPPPEEEMTKKQVTLTCMVTDFMPE | |
| | DIYVEWTNNGKTELNYKNTEPVLD | |
| | SDGSYFMYSKLRVEKKNWVERNSY | |
| | SCSVVHEGLHNHHTTKSFSRTPGK | |
| | (SEQ ID NO: 74) | |
| I23RB54 | EVQLQQSGGGLVKPGGSLKLSCAA | DIQMTQSPKFLLVSAGDRVTITCKASQSV |
| | SGFTFSSYAMSWVRQTPEKRLEWV | SNDVAWYQQKPGQSPRLLIYYASNRYTG |
| | AGISSGGSYIYYPDNVKGRFTISRDN | VPDRFTGSGYGTDFTFTISTVQAEDLAVY |
| | ARNTLYLQMSSLRSEDTAMYYCAR | FCQQDYSSLPTFGAGTKLEMKRADAAPT |
| | KKSDYGAMDYWGQGTTLTVSSAK | VSIFPPSSEQLTSGGASVVCFLNNFYPKDI |
| | TTAPSVYPLAPVCGDTTGSSVTLGC | NVKWKIDGSERQNGVLNSWTDQDSKDS |
| | LVKGYFPEPVTLTWNSGSLSSGVHT | TYSMSSTLTLTKDEYERHNSYTCEATHKT |
| | FPAVLQSDLYTLSSSVTVTSSTWPSQ | STSPIVKSFNRNEC (SEQ ID NO: 77) |
| | SITCNVAHPASSTKVDKKIEPRGPTI | |
| | KPCPPCKCPAPNLLGGPSVFIFPPKIK | |
| | DVLMISLSPIVTCVVVDVSEDDPDV | |
| | QISWFVNNVEVHTAQTQTHREDYN | |
| | STLRVVSALPIQHQDWMSGKEFKC | |
| | KVNNKDLPAPIERTISKPKGSVRAPQ | |
| | VYVLPPPEEEMTKKQVTLTCMVTD | |
| | FMPEDIYVEWTNNGKTELNYKNTE | |
| | PVLDSDGSYFMYSKLRVEKKNWVE | |
| | RNSYSCSVVHEGLHNHHTTKSFSRT | |
| | PGK (SEQ ID NO: 76) | |
| I23RB56 | EVKLVESGGGLVKPGGSLKLSCAAS | DIVMTQSPKFLLVSAGDRVTITCKASQSV |
| | GFTFSSYAMSWVRQTPEKRLEWVA | SNDVAWYQQKPGQSPKLLIYYASNRYTG |
| | AINSNDGSTYYPDTVKDRFTISRDN | VPDRFTGSGYGTVFTFTISTVQAEDLAVY |
| | AKNTLYLQMSSLRSEDTALYYCAR | FCQQDYSSPFTFGSGTKLEIKRADAAPTV |
| | HFLYFSNFYYFDYWGQGTTLTVSSA | SIFPPSSEQLTSGGASVVCFLNNFYPKDIN |
| | KTTAPSVYPLAPVCGDTTGSSVTLG | VKWKIDGSERQNGVLNSWTDQDSKDST |
| | CLVKGYFPEPVTLTWNSGSLSSGVH | YSMSSTLTLTKDEYERHNSYTCEATHKTS |
| | TFPAVLQSDLYTLSSSVTVTSSTWPS | TSPIVKSFNRNEC (SEQ ID NO: 79) |
| | QSITCNVAHPASSTKVDKKIEPRGPT | |
| | IKPCPPCKCPAPNLLGGPSVFIFPPKI | |
| | KDVLMISLSPIVTCVVVDVSEDDPD | |
| | VQISWFVNNVEVHTAQTQTHREDY | |
| | NSTLRVVSALPIQHQDWMSGKEFK | |
| | CKVNNKDLPAPIERTISKPKGSVRAP | |
| | QVYVLPPPEEEMTKKQVTLTCMVT | |
| | DFMPEDIYVEWTNNGKTELNYKNT | |
| | EPVLDSDGSYFMYSKLRVEKKNWV | |
| | ERNSYSCSVVHEGLHNHHTTKSFSR | |
| | TPGK (SEQ ID NO: 78) | |
| I23RB57 | EFQLQQSGPELVKPGASVKMSCKAS | DIVMTQSPAIMSASLGERVTMTCTASSSV |
| | GYTFTNYYMHWVKQSHGKTIEWIG | SSSYLHWYQQKPGSSPKLWIYSTSNLASG |
| | YIYPNSGDTSYNQKFKGKATLTVDK | VPARFSGSGSGTSYSLTISSMEAEDAATY |
| | SSSTAYMELRSLTSEDSAVYNCARF | YCHQYHRSPFTFGSGTKLEIKRADAAPTV |
| | GGFYDAMDYWGQGTSVTVSSAKT | SIFPPSSEQLTSGGASVVCFLNNFYPKDIN |
| | TAPSVYPLAPVCGDTTGSSVTLGCL | VKWKIDGSERQNGVLNSWTDQDSKDST |
| | VKGYFPEPVTLTWNSGSLSSGVHTF | YSMSSTLTLTKDEYERHNSYTCEATHKTS |
| | PAVLQSDLYTLSSSVTVTSSTWPSQS | TSPIVKSFNRNEC (SEQ ID NO: 81) |
| | ITCNVAHPASSTKVDKKIEPRGPTIK | |
| | PCPPCKCPAPNLLGGPSVFIFPPKIKD | |
| | VLMISLSPIVTCVVVDVSEDDPDVQI | |
| | SWFVNNVEVHTAQTQTHREDYNST | |
| | LRVVSALPIQHQDWMSGKEFKCKV | |
| | NNKDLPAPIERTISKPKGSVRAPQVY | |
| | VLPPPEEEMTKKQVTLTCMVTDFM | |
| | PEDIYVEWTNNGKTELNYKNTEPVL | |
| | DSDGSYFMYSKLRVEKKNWVERNS | |
| | YSCSVVHEGLHNHHTTKSFSRTPGK | |
| | (SEQ ID NO: 80) | |
| I23RB58 | EVKLVESGGGLVKPGGSLKLSCAAS | DIVMTQTPASLAVSLGQRATISCRASESV |
| | GFSFIIYTMSWVRQTPEKRLEWVAY | DSYGNSFMHWYQQKPGQPPKLLIYRASN |
| | ITSGGGITYYPDSVKGRFTISRDNAR | LESGIPARFSGSGSRTDFTLTINPVEADDV |
| | NTLYLQMSSLRSEDTAMYYCARHE | ATYYCQQSNEDPLTFGAGTKLEMKRADA |
| | GDYYDDYYRIGYAMDYWGQGTSV | APTVSIFPPSSEQLTSGGASVVCFLNNFYP |
| | TVSSAKTTAPSVYPLAPVCGDTTGS | KDINVKWKIDGSERQNGVLNSWTDQDSK |
| | SVTLGCLVKGYFPEPVTLTWNSGSL | DSTYSMSSTLTLTKDEYERHNSYTCEATH |
| | SSGVHTFPAVLQSDLYTLSSSVTVTS | KTSTSPIVKSFNRNEC (SEQ ID NO: 83) |
| | STWPSQSITCNVAHPASSTKVDKKIE | |
| | PRGPTIKPCPPCKCPAPNLLGGPSVFI | |
| | FPPKIKDVLMISLSPIVTCVVVDVSE | |
| | DDPDVQISWFVNNVEVHTAQTQTH | |
| | REDYNSTLRVVSALPIQHQDWMSG | |
| | KEFKCKVNNKDLPAPIERTISKPKGS | |
| | VRAPQVYVLPPPEEEMTKKQVTLTC | |
| | MVTDFMPEDIYVEWTNNGKTELNY | |
| | KNTEPVLDSDGSYFMYSKLRVEKK | |
| | NWVERNSYSCSVVHEGLHNHHTTK | |
| | SFSRTPGK (SEQ ID NO: 82) | |
| I23RB60 | DVQLQESGPELVKPGDSVKMSCEA | DIVMTQSTSSLSASLGDRVTISCRASQDIR |
| | SGYTFTDYYIDWVKQSHGKSLEWI | NNLNWYQQKPDGTVKLLIFYSSRLHSGV |
| | GYIYPNNGGISFNQKFEGKATLTVD | PSRFSGSGSGTDYSLTISNLEQEDIATYFC |
| | KSSSTAYMELHSLTSEDSAVYYCAR | QQGHTLPWTFGAGTKLELKRADAAPTVS |
| | EKLRGRDYWGQGTTLTVSSAKTTA | IFPPSSEQLTSGGASVVCFLNNFYPKDINV |
| | PSVYPLAPVCGDTTGSSVTLGCLVK | KWKIDGSERQNGVLNSWTDQDSKDSTYS |
| | GYFPEPVTLTWNSGSLSSGVHTFPA | MSSTLTLTKDEYERHNSYTCEATHKTSTS |
| | VLQSDLYTLSSSVTVTSSTWPSQSIT | PIVKSFNRNEC (SEQ ID NO: 85) |
| | CNVAHPASSTKVDKKIEPRGPTIKPC | |
| | PPCKCPAPNLLGGPSVFIFPPKIKDV | |
| | LMISLSPIVTCVVVDVSEDDPDVQIS | |
| | WFVNNVEVHTAQTQTHREDYNSTL | |
| | RVVSALPIQHQDWMSGKEFKCKVN | |
| | NKDLPAPIERTISKPKGSVRAPQVYV | |
| | LPPPEEEMTKKQVTLTCMVTDFMPE | |
| | DIYVEWTNNGKTELNYKNTEPVLD | |
| | SDGSYFMYSKLRVEKKNWVERNSY | |
| | SCSVVHEGLHNHHTTKSFSRTPGK | |
| | (SEQ ID NO: 84) | |
| I23RB61 | DVQLQESGAELVKPGASVKLSCKSF | DIQMTQSHKFLSTSVGDRITITCKASQDVI |
| | DYTFTSFDINWMKQRPGQGLEWIG | TAVAWYQQKSGQSPKLLIYWASTRHTGV |
| | WIFPGSGTTNYNEKFKGKATLTADK | PDRFTGSGSGTDYTLTISNVQAEDLALYY |
| | SSSTAYMHLTSLTSEDSAVYFCARR | CQQHYTTPPTFGAGTKLELKRADAAPTV |
| | LTGTRYFDVWGTGTTLTVSSAKTT | SIFPPSSEQLTSGGASVVCFLNNFYPKDIN |
| | APSVYPLAPVCGDTTGSSVTLGCLV | VKWKIDGSERQNGVLNSWTDQDSKDST |
| | KGYFPEPVTLTWNSGSLSSGVHTFP | YSMSSTLTLTKDEYERHNSYTCEATHKTS |
| | AVLQSDLYTLSSSVTVTSSTWPSQSI | TSPIVKSFNRNEC (SEQ ID NO: 87) |
| | TCNVAHPASSTKVDKKIEPRGPTIKP | |
| | CPPCKCPAPNLLGGPSVFIFPPKIKD | |
| | VLMISLSPIVTCVVVDVSEDDPDVQI | |
| | SWFVNNVEVHTAQTQTHREDYNST | |
| | LRVVSALPIQHQDWMSGKEFKCKV | |
| | NNKDLPAPIERTISKPKGSVRAPQVY | |
| | VLPPPEEEMTKKQVTLTCMVTDFM | |
| | PEDIYVEWTNNGKTELNYKNTEPVL | |
| | DSDGSYFMYSKLRVEKKNWVERNS | |
| | YSCSVVHEGLHNHHTTKSFSRTPGK | |
| | (SEQ ID NO: 86) | |
| I23RB65 | EVQLQQSGPELVKPGASVKISCKAS | QIVLTQSPASLAVSLGQRATISCRASQSVS |
| | GYTFTDHTMDWVKQSHGKSLEWIG | TSSYNYIHWYQQKPGQPPKLLIKYASNLE |
| | YIYPKSGNAAYSQKFKSEATLTVDK | SGVPARFSGSGSGTDFTLNIHPVEEDDTA |
| | SSSTAYMEFHSLTSEDSAVYYCAR | TYYCQHTWEIPYTFGSGTKLEIKRADAAP |
| | WGLRRDGFTYWGQGTSVTVSSAKT | TVSIFPPSSEQLTSGGASVVCFLNNFYPKD |
| | TAPSVYPLAPVCGDTTGSSVTLGCL | INVKWKIDGSERQNGVLNSWTDQDSKDS |
| | VKGYFPEPVTLTWNSGSLSSGVHTF | TYSMSSTLTLTKDEYERHNSYTCEATHKT |
| | PAVLQSDLYTLSSSVTVTSSTWPSQS | STSPIVKSFNRNEC (SEQ ID NO: 89) |
| | ITCNVAHPASSTKVDKKIEPRGPTIK | |
| | PCPPCKCPAPNLLGGPSVFIFPPKIKD | |
| | VLMISLSPIVTCVVVDVSEDDPDVQI | |
| | SWFVNNVEVHTAQTQTHREDYNST | |
| | LRVVSALPIQHQDWMSGKEFKCKV | |
| | NNKDLPAPIERTISKPKGSVRAPQVY | |
| | VLPPPEEEMTKKQVTLTCMVTDFM | |
| | PEDIYVEWTNNGKTELNYKNTEPVL | |
| | DSDGSYFMYSKLRVEKKNWVERNS | |
| | YSCSVVHEGLHNHHTTKSFSRTPGK | |
| | (SEQ ID NO: 88) | |
| I23RB66 | QVTLKESGPGILQPSQTLSLTCSFSG | DIVMTQSHKFMSTSVGDRVSITCKASQD |
| | FSLSTSNMGIGWIRQPSGKGLEWLA | VSTAVAWYQQKPGQSPKLLIYSASYRYT |
| | HIWWNSDKYYNPSLKSRLTISKDTS | GVPDRFTGSGSGTDFTFTFSSVQAEDLAV |
| | NNQVFLTITSVDTADTATYYCAQIR | YYCQQHYSTPYTFGGGTKLEIKRADAAP |
| | WLRFYFDYWGQGTTVTVSSAKTTA | TVSIFPPSSEQLTSGGASVVCFLNNFYPKD |
| | PSVYPLAPVCGDTTGSSVTLGCLVK | INVKWKIDGSERQNGVLNSWTDQDSKDS |
| | GYFPEPVTLTWNSGSLSSGVHTFPA | TYSMSSTLTLTKDEYERHNSYTCEATHKT |
| | VLQSDLYTLSSSVTVTSSTWPSQSIT | STSPIVKSFNRNEC (SEQ ID NO: 91) |
| | CNVAHPASSTKVDKKIEPRGPTIKPC | |
| | PPCKCPAPNLLGGPSVFIFPPKIKDV | |
| | LMISLSPIVTCVVVDVSEDDPDVQIS | |
| | WFVNNVEVHTAQTQTHREDYNSTL | |
| | RVVSALPIQHQDWMSGKEFKCKVN | |
| | NKDLPAPIERTISKPKGSVRAPQVYV | |
| | LPPPEEEMTKKQVTLTCMVTDFMPE | |
| | DIYVEWTNNGKTELNYKNTEPVLD | |
| | SDGSYFMYSKLRVEKKNWVERNSY | |
| | SCSVVHEGLHNHHTTKSFSRTPGK | |
| | (SEQ ID NO: 90) | |
| I23RB67 | EVQLQQSGAELVKPGASVKLSCKA | DVVMTQSHKFMSTSVGDRVSITCKASQD |
| | SGYTFTSYWINWVKQRPGQGLEWI | VSTAVAWYQQKPGQSPKLLIYSAFYRYT |
| | GNIYPGSSSTNYNEKFKSKATLTVD | GVPDRFTGSGSGTDFTFTISSVQAEDLAV |
| | TSSSTAYMQLSSLTSDDSAVYYCAR | YYCQQHYSTPYTFGGGTKLELKRADAAP |
| | SAYGNRLAMDYWGQGTTLTVSSA | TVSIFPPSSEQLTSGGASVVCFLNNFYPKD |
| | KTTAPSVYPLAPVCGDTTGSSVTLG | INVKWKIDGSERQNGVLNSWTDQDSKDS |
| | CLVKGYFPEPVTLTWNSGSLSSGVH | TYSMSSTLTLTKDEYERHNSYTCEATHKT |
| | TFPAVLQSDLYTLSSSVTVTSSTWPS | STSPIVKSFNRNEC (SEQ ID NO: 93) |
| | QSITCNVAHPASSTKVDKKIEPRGPT | |
| | IKPCPPCKCPAPNLLGGPSVFIFPPKI | |
| | KDVLMISLSPIVTCVVVDVSEDDPD | |
| | VQISWFVNNVEVHTAQTQTHREDY | |
| | NSTLRVVSALPIQHQDWMSGKEFK | |
| | CKVNNKDLPAPIERTISKPKGSVRAP | |
| | QVYVLPPPEEEMTKKQVTLTCMVT | |
| | DFMPEDIYVEWTNNGKTELNYKNT | |
| | EPVLDSDGSYFMYSKLRVEKKNWV | |
| | ERNSYSCSVVHEGLHNHHTTKSFSR | |
| | TPGK (SEQ ID NO: 92) | |
| I23RB69 | EVQLQQSGAELVKPGASVKISCKAS | DIVMTQSHKFMSTSVGDRVSITCKASQD |
| | GYSFTGYNMNWVKQSHGKSLEWIG | VSTAVAWYQQKPGQSPKLLIYSASYRYT |
| | NINPFYDKTSYNQKFKGKATLTVDK | GVPDRFTGSGSGTDFTFTISSVQAEDLAV |
| | ASSTAYMQLNSLTSEDSAVYYCAR | YYCQQHYSTPWTFGGGTKLEMKRADAA |
| | QLGLKGFAYWGQGTLVTVSAAKTT | PTVSIFPPSSEQLTSGGASVVCFLNNFYPK |
| | APSVYPLAPVCGDTTGSSVTLGCLV | DINVKWKIDGSERQNGVLNSWTDQDSKD |
| | KGYFPEPVTLTWNSGSLSSGVHTFP | STYSMSSTLTLTKDEYERHNSYTCEATHK |
| | AVLQSDLYTLSSSVTVTSSTWPSQSI | TSTSPIVKSFNRNEC (SEQ ID NO: 95) |
| | TCNVAHPASSTKVDKKIEPRGPTIKP | |
| | CPPCKCPAPNLLGGPSVFIFPPKIKD | |
| | VLMISLSPIVTCVVVDVSEDDPDVQI | |
| | SWFVNNVEVHTAQTQTHREDYNST | |
| | LRVVSALPIQHQDWMSGKEFKCKV | |
| | NNKDLPAPIERTISKPKGSVRAPQVY | |
| | VLPPPEEEMTKKQVTLTCMVTDFM | |
| | PEDIYVEWTNNGKTELNYKNTEPVL | |
| | DSDGSYFMYSKLRVEKKNWVERNS | |
| | YSCSVVHEGLHNHHTTKSFSRTPGK | |
| | (SEQ ID NO: 94) | |
| I23RB71 | DVQLQESGPDLVKPSQSLSLTCTVT | DIVMTQSHKFMSTSVGDRVSITCKASQD |
| | DYSITRGYNWHWIRQFPGNKLEWM | VITAVAWYQQKPGQSPKLLIYSASYRYT |
| | GYIHYSGSTNYNPSLKSRISITRDTS | GVPDRFTGSGSGTDFTFTISSVQAEDLAV |
| | KNQFFLQLNSVTTEDTATYYCARQ | YFCQQHFGTPYTFGSGTKLEMKRADAAP |
| | YGLKAMDYWGQGTSVTVSSAKTT | TVSIFPPSSEQLTSGGASVVCFLNNFYPKD |
| | APSVYPLAPVCGDTTGSSVTLGCLV | INVKWKIDGSERQNGVLNSWTDQDSKDS |
| | KGYFPEPVTLTWNSGSLSSGVHTFP | TYSMSSTLTLTKDEYERHNSYTCEATHKT |
| | AVLQSDLYTLSSSVTVTSSTWPSQSI | STSPIVKSFNRNEC (SEQ ID NO: 97) |
| | TCNVAHPASSTKVDKKIEPRGPTIKP | |
| | CPPCKCPAPNLLGGPSVFIFPPKIKD | |
| | VLMISLSPIVTCVVVDVSEDDPDVQI | |
| | SWFVNNVEVHTAQTQTHREDYNST | |
| | LRVVSALPIQHQDWMSGKEFKCKV | |
| | NNKDLPAPIERTISKPKGSVRAPQVY | |
| | VLPPPEEEMTKKQVTLTCMVTDFM | |
| | PEDIYVEWTNNGKTELNYKNTEPVL | |
| | DSDGSYFMYSKLRVEKKNWVERNS | |
| | YSCSVVHEGLHNHHTTKSFSRTPGK | |
| | (SEQ ID NO: 96) | |
| I23RB73 | EVQLQQSGAELVKPGASVKISCKAS | DIVMTQSHKFMSTSVGDRVSITCKASQD |
| | GYTFTDHAIHWVKQRPEQGLEWIG | VSTAVAWYQQKPGQSPKLLIYWASTRLT |
| | YISLGNGDIKYSEKFRGKATLTADK | GVPDRFTGSGSGTDYTLTISSVQAEDLAL |
| | TSNTAYMQLNSLTSEDSAVYFCKRS | YYCQQYYNTPLTFGAGTKLELKRADAAP |
| | RVLRWTTYWYFDVWGAGTSVTVS | TVSIFPPSSEQLTSGGASVVCFLNNFYPKD |
| | SAKTTAPSVYPLAPVCGDTTGSSVT | INVKWKIDGSERQNGVLNSWTDQDSKDS |
| | LGCLVKGYFPEPVTLTWNSGSLSSG | TYSMSSTLTLTKDEYERHNSYTCEATHKT |
| | VHTFPAVLQSDLYTLSSSVTVTSST | STSPIVKSFNRNEC (SEQ ID NO: 99) |
| | WPSQSITCNVAHPASSTKVDKKIEP | |
| | RGPTIKPCPPCKCPAPNLLGGPSVFIF | |
| | PPKIKDVLMISLSPIVTCVVVDVSED | |
| | DPDVQISWFVNNVEVHTAQTQTHR | |
| | EDYNSTLRVVSALPIQHQDWMSGK | |
| | EFKCKVNNKDLPAPIERTISKPKGSV | |
| | RAPQVYVLPPPEEEMTKKQVTLTC | |
| | MVTDFMPEDIYVEWTNNGKTELNY | |
| | KNTEPVLDSDGSYFMYSKLRVEKK | |
| | NWVERNSYSCSVVHEGLHNHHTTK | |
| | SFSRTPGK (SEQ ID NO: 98) | |
| I23RB74 | DVQLQESGPGLVKPSQSLSLTCSVT | DIVLTQSPASLAVSLGQRATISCRASKSVS |
| | GYSITSGYYWNWIRQFPGNKLEWM | TSGSNFLHWYQQKPGQPPKLLIYFASNLE |
| | GYISYDGSFNYNPSLKNRLSITRDTS | SGVPARFSGSGSGTDFTLNIHPVEEEDAA |
| | MNQFFLKLNSVTSEDTATYYCARA | TYYCQHSRELPHTFGAGTKLELKRADAA |
| | EIYYDYDGDFDYWGQGTTLTVSSA | PTVSIFPPSSEQLTSGGASVVCFLNNFYPK |
| | KTTAPSVYPLAPVCGDTTGSSVTLG | DINVKWKIDGSERQNGVLNSWTDQDSKD |
| | CLVKGYFPEPVTLTWNSGSLSSGVH | STYSMSSTLTLTKDEYERHNSYTCEATHK |
| | TFPAVLQSDLYTLSSSVTVTSSTWPS | TSTSPIVKSFNRNEC (SEQ ID NO: 101) |
| | QSITCNVAHPASSTKVDKKIEPRGPT | |
| | IKPCPPCKCPAPNLLGGPSVFIFPPKI | |
| | KDVLMISLSPIVTCVVVDVSEDDPD | |
| | VQISWFVNNVEVHTAQTQTHREDY | |
| | NSTLRVVSALPIQHQDWMSGKEFK | |
| | CKVNNKDLPAPIERTISKPKGSVRAP | |
| | QVYVLPPPEEEMTKKQVTLTCMVT | |
| | DFMPEDIYVEWTNNGKTELNYKNT | |
| | EPVLDSDGSYFMYSKLRVEKKNWV | |
| | ERNSYSCSVVHEGLHNHHTTKSFSR | |
| | TPGK (SEQ ID NO: 100) | |
| I23RB76 | EVQLQQSGPELVKPGASVKMSCKA | DIVLTQSPATLCVTPGETVSLSCRASQNIY |
| | SGYTFTDYYMNWMKQSHGKSLEW | KNLHWFQQKSHRSPRLLIKYASDSISGIPS |
| | IGYISPKNGRTGYNQKFKGKATLTV | RFTGSGSGTDYTLSINSVKPEDEGIYYCLQ |
| | DKSSTTAYMELRSLTSEDSAVYYCA | GYSTPWTFGGGTKLEIKRADAAPTVSIFP |
| | KSNGYYALDYWGQGTTVTVSSAKT | PSSEQLTSGGASVVCFLNNFYPKDINVKW |
| | TAPSVYPLAPVCGDTTGSSVTLGCL | KIDGSERQNGVLNSWTDQDSKDSTYSMS |
| | VKGYFPEPVTLTWNSGSLSSGVHTF | STLTLTKDEYERHNSYTCEATHKTSTSPIV |
| | PAVLQSDLYTLSSSVTVTSSTWPSQS | KSFNRNEC (SEQ ID NO: 103) |
| | ITCNVAHPASSTKVDKKIEPRGPTIK | |
| | PCPPCKCPAPNLLGGPSVFIFPPKIKD | |
| | VLMISLSPIVTCVVVDVSEDDPDVQI | |
| | SWFVNNVEVHTAQTQTHREDYNST | |
| | LRVVSALPIQHQDWMSGKEFKCKV | |
| | NNKDLPAPIERTISKPKGSVRAPQVY | |
| | VLPPPEEEMTKKQVTLTCMVTDFM | |
| | PEDIYVEWTNNGKTELNYKNTEPVL | |
| | DSDGSYFMYSKLRVEKKNWVERNS | |
| | YSCSVVHEGLHNHHTTKSFSRTPGK | |
| | (SEQ ID NO: 102) | |
| I23RB77 | DVQLQESGPGLVAPSQSLSITCTVSG | DIVMTQSPASLALSLGQRATISCRASESV |
| | FSLSRYSVHWVRQPPGKGLEWLGM | DSYGNSFMHWYQQKPGQPPKLLIYLASN |
| | IWGSGSTDYNSALKSRLSINKDNSK | LESGVPARFSGSGSRTDFTLTIDPVEADD |
| | SQVFLKMNSLQTDDTAMYYCARV | AAIYYCQQNNEEPNTFGAGTKLEMKRAD |
| | YYGGSPYAMDYWGQGTTVTVSSA | AAPTVSIFPPSSEQLTSGGASVVCFLNNFY |
| | KTTAPSVYPLAPVCGDTTGSSVTLG | PKDINVKWKIDGSERQNGVLNSWTDQDS |
| | CLVKGYFPEPVTLTWNSGSLSSGVH | KDSTYSMSSTLTLTKDEYERHNSYTCEAT |
| | TFPAVLQSDLYTLSSSVTVTSSTWPS | HKTSTSPIVKSFNRNEC (SEQ ID NO: 105) |
| | QSITCNVAHPASSTKVDKKIEPRGPT | |
| | IKPCPPCKCPAPNLLGGPSVFIFPPKI | |
| | KDVLMISLSPIVTCVVVDVSEDDPD | |
| | VQISWFVNNVEVHTAQTQTHREDY | |
| | NSTLRVVSALPIQHQDWMSGKEFK | |
| | CKVNNKDLPAPIERTISKPKGSVRAP | |
| | QVYVLPPPEEEMTKKQVTLTCMVT | |
| | DFMPEDIYVEWTNNGKTELNYKNT | |
| | EPVLDSDGSYFMYSKLRVEKKNWV | |
| | ERNSYSCSVVHEGLHNHHTTKSFSR | |
| | TPGK (SEQ ID NO: 104) | |
| I23RB78 | EFQLQQSGGGLVKPGGSLKLSCAAS | DIVMTQSPASLAVSLGQRATISCRASESV |
| | GFTFSNYTMSWVRQTPEKRLKWVA | DSYGISFMHWYQQKPGQPPKLLIYRASNL |
| | CISSGGGNTYYPDSVKGRFTISRDN | ESGIPARFSGSGSRTDFTLTINPVEADDVA |
| | ARNTLYLQMSSLRSEDTAMYYCAR | TYYCQQSNEDPWTFGAGTGLEIKRADAA |
| | RNYRRAMDYWGQGTSVTVSSAKT | PTVSIFPPSSEQLTSGGASVVCFLNNFYPK |
| | TAPSVYPLAPVCGDTTGSSVTLGCL | DINVKWKIDGSERQNGVLNSWTDQDSKD |
| | VKGYFPEPVTLTWNSGSLSSGVHTF | STYSMSSTLTLTKDEYERHNSYTCEATHK |
| | PAVLQSDLYTLSSSVTVTSSTWPSQS | TSTSPIVKSFNRNEC (SEQ ID NO: 107) |
| | ITCNVAHPASSTKVDKKIEPRGPTIK | |
| | PCPPCKCPAPNLLGGPSVFIFPPKIKD | |
| | VLMISLSPIVTCVVVDVSEDDPDVQI | |
| | SWFVNNVEVHTAQTQTHREDYNST | |
| | LRVVSALPIQHQDWMSGKEFKCKV | |
| | NNKDLPAPIERTISKPKGSVRAPQVY | |
| | VLPPPEEEMTKKQVTLTCMVTDFM | |
| | PEDIYVEWTNNGKTELNYKNTEPVL | |
| | DSDGSYFMYSKLRVEKKNWVERNS | |
| | YSCSVVHEGLHNHHTTKSFSRTPGK | |
| | (SEQ ID NO: 106) | |
| I23RB79 | DVQLQESGPELVRPGASVKMSCKA | DIQMTQSPKFLHVSAGDRVTITCKASQSV |
| | SGYTFTDYYMNWVKQSHGKSLEWI | INDVAWYQQKPGQSPKLLIYYASNRYTG |
| | GYIYPNNGDTVYNQKFKGKATLTV | VPDRFTGSGYGTDFTFTISTVQAEDLAIYF |
| | DKSSNTAYMELRSLTSEDSAVYYC | CQQDYSSPPTFGAGTRLEIKRADAAPTVSI |
| | ARGTLTGMYYFDYWGQGTSVTVSS | FPPSSEQLTSGGASVVCFLNNFYPKDINV |
| | AKTTAPSVYPLAPVCGDTTGSSVTL | KWKIDGSERQNGVLNSWTDQDSKDSTYS |
| | GCLVKGYFPEPVTLTWNSGSLSSGV | MSSTLTLTKDEYERHNSYTCEATHKTSTS |
| | HTFPAVLQSDLYTLSSSVTVTSSTW | PIVKSFNRNEC (SEQ ID NO: 109) |
| | PSQSITCNVAHPASSTKVDKKIEPRG | |
| | PTIKPCPPCKCPAPNLLGGPSVFIFPP | |
| | KIKDVLMISLSPIVTCVVVDVSEDDP | |
| | DVQISWFVNNVEVHTAQTQTHRED | |
| | YNSTLRVVSALPIQHQDWMSGKEF | |
| | KCKVNNKDLPAPIERTISKPKGSVR | |
| | APQVYVLPPPEEEMTKKQVTLTCM | |
| | VTDFMPEDIYVEWTNNGKTELNYK | |
| | NTEPVLDSDGSYFMYSKLRVEKKN | |
| | WVERNSYSCSVVHEGLHNHHTTKS | |
| | FSRTPGK (SEQ ID NO: 108) | |
| I23RB80 | DVQLQESGPGLVQPSQSLSITCTVSG | DIVMTQSQKFMSTSEGDRVNITCKASQNI |
| | FSLTSYGVHWVRQSPGKGLEWLGV | RTAVAWYQQKPGQSPKPLIYLASNRHTG |
| | IWSGVSTDYNAAFISRLSISKDNSKS | VPDRFTGSGSGTDFTLTISNVQSEDLAEYF |
| | QVFFKMNSLQADDTAIYYCARSRG | CLQHWNYPLTFGAGTKLELKRADAAPTV |
| | SYYFDYWGQGTTLTVSSAKTTAPS | SIFPPSSEQLTSGGASVVCFLNNFYPKDIN |
| | VYPLAPVCGDTTGSSVTLGCLVKG | VKWKIDGSERQNGVLNSWTDQDSKDST |
| | YFPEPVTLTWNSGSLSSGVHTFPAV | YSMSSTLTLTKDEYERHNSYTCEATHKTS |
| | LQSDLYTLSSSVTVTSSTWPSQSITC | TSPIVKSFNRNEC (SEQ ID NO: 111) |
| | NVAHPASSTKVDKKIEPRGPTIKPCP | |
| | PCKCPAPNLLGGPSVFIFPPKIKDVL | |
| | MISLSPIVTCVVVDVSEDDPDVQIS | |
| | WFVNNVEVHTAQTQTHREDYNSTL | |
| | RVVSALPIQHQDWMSGKEFKCKVN | |
| | NKDLPAPIERTISKPKGSVRAPQVYV | |
| | LPPPEEEMTKKQVTLTCMVTDFMPE | |
| | DIYVEWTNNGKTELNYKNTEPVLD | |
| | SDGSYFMYSKLRVEKKNWVERNSY | |
| | SCSVVHEGLHNHHTTKSFSRTPGK | |
| | (SEQ ID NO: 110) | |
| I23RB81 | DVQLQESGPGLVAPSQSLSITCTVSG | DIVMTQSHKFMSTSVGDRVSIICKASQDV |
| | FSLTSYAINWVRQPPGKGLEWLGVI | STAVAWYQQKPGQSPKLLIYSASYRYTG |
| | WTGGGTNYNSALKSRLSISKDNSKS | VPDRFTGSGSGTDFTFTISSVQAEDLAVY |
| | QLFLKMNSLQTDDTARYYCARNRD | YCQQHYSTPLTFGAGTRLEIKRADAAPTV |
| | YSNYRWYFDVWGAGTSVTVSSAKT | SIFPPSSEQLTSGGASVVCFLNNFYPKDIN |
| | TAPSVYPLAPVCGDTTGSSVTLGCL | VKWKIDGSERQNGVLNSWTDQDSKDST |
| | VKGYFPEPVTLTWNSGSLSSGVHTF | YSMSSTLTLTKDEYERHNSYTCEATHKTS |
| | PAVLQSDLYTLSSSVTVTSSTWPSQS | TSPIVKSFNRNEC (SEQ ID NO: 113) |
| | ITCNVAHPASSTKVDKKIEPRGPTIK | |
| | PCPPCKCPAPNLLGGPSVFIFPPKIKD | |
| | VLMISLSPIVTCVVVDVSEDDPDVQI | |
| | SWFVNNVEVHTAQTQTHREDYNST | |
| | LRVVSALPIQHQDWMSGKEFKCKV | |
| | NNKDLPAPIERTISKPKGSVRAPQVY | |
| | VLPPPEEEMTKKQVTLTCMVTDFM | |
| | PEDIYVEWTNNGKTELNYKNTEPVL | |
| | DSDGSYFMYSKLRVEKKNWVERNS | |
| | YSCSVVHEGLHNHHTTKSFSRTPGK | |
| | (SEQ ID NO: 112) | |
| I23RB82 | QVQLKESGPGLVAPSQSLSITCTVSG | QIVLSQSHKFMSTSVGDRVSITCKASQDV |
| | FSLTNYALHWFRQSPGKGLEWLGVI | STAVAWYQQKPGQSPKLLIYSAFYRYTG |
| | WSDGSTDYNSPFISRLSISKDNSKSQ | VPDRFTGSGSGTDFTFTISSVQAEDLAVY |
| | VFFKMNSLQADDTAIYYCARSRSN | YCQQHYSTPYTFGGGTKLEIKRADAAPT |
| | YGRWYFDVWGAGTTLTVSSAKTTA | VSIFPPSSEQLTSGGASVVCFLNNFYPKDI |
| | PSVYPLAPVCGDTTGSSVTLGCLVK | NVKWKIDGSERQNGVLNSWTDQDSKDS |
| | GYFPEPVTLTWNSGSLSSGVHTFPA | TYSMSSTLTLTKDEYERHNSYTCEATHKT |
| | VLQSDLYTLSSSVTVTSSTWPSQSIT | STSPIVKSFNRNEC (SEQ ID NO: 115) |
| | CNVAHPASSTKVDKKIEPRGPTIKPC | |
| | PPCKCPAPNLLGGPSVFIFPPKIKDV | |
| | LMISLSPIVTCVVVDVSEDDPDVQIS | |
| | WFVNNVEVHTAQTQTHREDYNSTL | |
| | RVVSALPIQHQDWMSGKEFKCKVN | |
| | NKDLPAPIERTISKPKGSVRAPQVYV | |
| | LPPPEEEMTKKQVTLTCMVTDFMPE | |
| | DIYVEWTNNGKTELNYKNTEPVLD | |
| | SDGSYFMYSKLRVEKKNWVERNSY | |
| | SCSVVHEGLHNHHTTKSFSRTPGK | |
| | (SEQ ID NO: 114) | |
| I23RB83 | DVQLQESGPGLVAPSQSLSITCTVSG | DIQMTQSPASQSASLGESVTITCLASQTIG |
| | FSLTNYDVHWVRQSPGKGLEWLGV | SWLAWYQQKPGKSPQLLIYAATSLADGV |
| | IWSDGSTDYNAAFISRLSFSKDNSKR | PSRFSGSGSGTKFSFKISSLQAEDFVSYYC |
| | QVFFKMNSLQPDDTAIYYCARNNY | QQLYSSPLTFGGGTKLEIKRADAAPTVSIF |
| | YRYGRNPMDYWGQGTTVTVSSAK | PPSSEQLTSGGASVVCFLNNFYPKDINVK |
| | TTAPSVYPLAPVCGDTTGSSVTLGC | WKIDGSERQNGVLNSWTDQDSKDSTYS |
| | LVKGYFPEPVTLTWNSGSLSSGVHT | MSSTLTLTKDEYERHNSYTCEATHKTSTS |
| | FPAVLQSDLYTLSSSVTVTSSTWPSQ | PIVKSFNRNEC (SEQ ID NO: 117) |
| | SITCNVAHPASSTKVDKKIEPRGPTI | |
| | KPCPPCKCPAPNLLGGPSVFIFPPKIK | |
| | DVLMISLSPIVTCVVVDVSEDDPDV | |
| | QISWFVNNVEVHTAQTQTHREDYN | |
| | STLRVVSALPIQHQDWMSGKEFKC | |
| | KVNNKDLPAPIERTISKPKGSVRAPQ | |
| | VYVLPPPEEEMTKKQVTLTCMVTD | |
| | FMPEDIYVEWTNNGKTELNYKNTE | |
| | PVLDSDGSYFMYSKLRVEKKNWVE | |
| | RNSYSCSVVHEGLHNHHTTKSFSRT | |
| | PGK (SEQ ID NO: 116) | |
| I23RB85 | DVQLQESGPGLVAPSQSLSITCTVSG | DIVLTQSPLSLFVSLGDQASISCRSSQSLV |
| | FSFNTYAITWVRQPPGRGLEWLGVL | HSNGNTYLHWYLQKPGQSPKLLIYKVSN |
| | WPGGGISYNLALKSRLTISRDSSKSQ | RFSGVPDRFSGSGSGTDFTLKISRVEAEDL |
| | VFLEMNSLQTDDTARYYCARNWR | GVYFCSQSTHVPWTFGGGTRLEIKRADA |
| | HYDGSYAMDFWGQGTSVTVSSAKT | APTVSIFPPSSEQLTSGGASVVCFLNNFYP |
| | TAPSVYPLAPVCGDTTGSSVTLGCL | KDINVKWKIDGSERQNGVLNSWTDQDSK |
| | VKGYFPEPVTLTWNSGSLSSGVHTF | DSTYSMSSTLTLTKDEYERHNSYTCEATH |
| | PAVLQSDLYTLSSSVTVTSSTWPSQS | KTSTSPIVKSFNRNEC (SEQ ID NO: 119) |
| | ITCNVAHPASSTKVDKKIEPRGPTIK | |
| | PCPPCKCPAPNLLGGPSVFIFPPKIKD | |
| | VLMISLSPIVTCVVVDVSEDDPDVQI | |
| | SWFVNNVEVHTAQTQTHREDYNST | |
| | LRVVSALPIQHQDWMSGKEFKCKV | |
| | NNKDLPAPIERTISKPKGSVRAPQVY | |
| | VLPPPEEEMTKKQVTLTCMVTDFM | |
| | PEDIYVEWTNNGKTELNYKNTEPVL | |
| | DSDGSYFMYSKLRVEKKNWVERNS | |
| | YSCSVVHEGLHNHHTTKSFSRTPGK | |
| | (SEQ ID NO: 118) | |
| I23RB86 | EVQLQQSGAELVKPGASVKLSCKA | DIVMTQSPSSMSVSLGDTVSITCHASQGIS |
| | SGYTFTSYWLHWVKQRPGQGLEWI | SNIGWLQQKPGKSFKGLIYHGTNLEDEVP |
| | GEIDPSDSYTYYNQKFKGKATLTVD | SRFSGSGSGADYSLTIGSLESEDFADYYC |
| | KSSSTAYMQLSSLTSEDSAVYYCAR | VQYAQFPWTFGAGTKLEMKRADAAPTV |
| | SPYDYDWGAYWGQGTSVTVSSAK | SIFPPSSEQLTSGGASVVCFLNNFYPKDIN |
| | TTAPSVYPLAPVCGDTTGSSVTLGC | VKWKIDGSERQNGVLNSWTDQDSKDST |
| | LVKGYFPEPVTLTWNSGSLSSGVHT | YSMSSTLTLTKDEYERHNSYTCEATHKTS |
| | FPAVLQSDLYTLSSSVTVTSSTWPSQ | TSPIVKSFNRNEC (SEQ ID NO: 121) |
| | SITCNVAHPASSTKVDKKIEPRGPTI | |
| | KPCPPCKCPAPNLLGGPSVFIFPPKIK | |
| | DVLMISLSPIVTCVVVDVSEDDPDV | |
| | QISWFVNNVEVHTAQTQTHREDYN | |
| | STLRVVSALPIQHQDWMSGKEFKC | |
| | KVNNKDLPAPIERTISKPKGSVRAPQ | |
| | VYVLPPPEEEMTKKQVTLTCMVTD | |
| | FMPEDIYVEWTNNGKTELNYKNTE | |
| | PVLDSDGSYFMYSKLRVEKKNWVE | |
| | RNSYSCSVVHEGLHNHHTTKSFSRT | |
| | PGK (SEQ ID NO: 120) | |
| I23RB87 | EFQLQQSGPELVKPGTSVKMSCKAS | DIVMTQTTSSLSASLGDRVTISCRASQDIS |
| | GYTFTNYVMHWVKQKPGQGLEWI | NYLNWYQQKPDGTVKLLIYYTSRLHSGV |
| | GYINPYDASPKYNEKFKGKAILTSD | PSRFSGSGSGTDFSLTISNLEQEDIATYFC |
| | KSSSTAYMELSSLTSEDSAVYYCTR | QQGITLPWTFGAGTKLELKRADAAPTVSI |
| | DAKLDYFDYWGQGTTLTVSSAKTT | FPPSSEQLTSGGASVVCFLNNFYPKDINV |
| | APSVYPLAPVCGDTTGSSVTLGCLV | KWKIDGSERQNGVLNSWTDQDSKDSTYS |
| | KGYFPEPVTLTWNSGSLSSGVHTFP | MSSTLTLTKDEYERHNSYTCEATHKTSTS |
| | AVLQSDLYTLSSSVTVTSSTWPSQSI | PIVKSFNRNEC (SEQ ID NO: 123) |
| | TCNVAHPASSTKVDKKIEPRGPTIKP | |
| | CPPCKCPAPNLLGGPSVFIFPPKIKD | |
| | VLMISLSPIVTCVVVDVSEDDPDVQI | |
| | SWFVNNVEVHTAQTQTHREDYNST | |
| | LRVVSALPIQHQDWMSGKEFKCKV | |
| | NNKDLPAPIERTISKPKGSVRAPQVY | |
| | VLPPPEEEMTKKQVTLTCMVTDFM | |
| | PEDIYVEWTNNGKTELNYKNTEPVL | |
| | DSDGSYFMYSKLRVEKKNWVERNS | |
| | YSCSVVHEGLHNHHTTKSFSRTPGK | |
| | (SEQ ID NO: 122) | |
| I23RB91 | EFQLQQFGPELLKPGASVKISCKAS | DIKMTQSPSSMYASLGERVTITCKASQDI |
| | GYTFTDYIMHWVKQSHGKSLEWIG | NSYLSWCQQKPGKSPKALIYRANSLVDG |
| | GISPNYGGTGYNGKFKDKATLTVD | VPSRFSGSGSGQDYSLTISSLEYEDMGIYY |
| | KSSSTAYMELRSLTSEDSAVYYCAR | CLQYDEFPYTFGGGTKLEMKRADAAPTV |
| | FNNYYYFDYWGQGTTLTVSSAKTT | SIFPPSSEQLTSGGASVVCFLNNFYPKDIN |
| | APSVYPLAPVCGDTTGSSVTLGCLV | VKWKIDGSERQNGVLNSWTDQDSKDST |
| | KGYFPEPVTLTWNSGSLSSGVHTFP | YSMSSTLTLTKDEYERHNSYTCEATHKTS |
| | AVLQSDLYTLSSSVTVTSSTWPSQSI | TSPIVKSFNRNEC (SEQ ID NO: 125) |
| | TCNVAHPASSTKVDKKIEPRGPTIKP | |
| | CPPCKCPAPNLLGGPSVFIFPPKIKD | |
| | VLMISLSPIVTCVVVDVSEDDPDVQI | |
| | SWFVNNVEVHTAQTQTHREDYNST | |
| | LRVVSALPIQHQDWMSGKEFKCKV | |
| | NNKDLPAPIERTISKPKGSVRAPQVY | |
| | VLPPPEEEMTKKQVTLTCMVTDFM | |
| | PEDIYVEWTNNGKTELNYKNTEPVL | |
| | DSDGSYFMYSKLRVEKKNWVERNS | |
| | YSCSVVHEGLHNHHTTKSFSRTPGK | |
| | (SEQ ID NO: 124) | |
| I23RB92 | EVQLQQSGPEVVKPGASVKISCKAS | DIKMTQSPASLAVSLGQRATISCRASQSV |
| | GYTFTDHTMDWVKQSHGKNLEWI | STSKYDYIHWYQQKSGQPPRLLIKYASNL |
| | GYIYPKSGGTGYNQKFKNKATLTV | ESGVPARFSGSGSGTDFTLNIHPVEEEDTA |
| | DKSSSTAYMEFHSLTSDDSAVYYCA | TYYCQHTWEIPYTFGSGTKLELKRADAA |
| | RWGLRRDGFVYWGQGTLVTVSAA | PTVSIFPPSSEQLTSGGASVVCFLNNFYPK |
| | KTTAPSVYPLAPVCGDTTGSSVTLG | DINVKWKIDGSERQNGVLNSWTDQDSKD |
| | CLVKGYFPEPVTLTWNSGSLSSGVH | STYSMSSTLTLTKDEYERHNSYTCEATHK |
| | TFPAVLQSDLYTLSSSVTVTSSTWPS | TSTSPIVKSFNRNEC (SEQ ID NO: 127) |
| | QSITCNVAHPASSTKVDKKIEPRGPT | |
| | IKPCPPCKCPAPNLLGGPSVFIFPPKI | |
| | KDVLMISLSPIVTCVVVDVSEDDPD | |
| | VQISWFVNNVEVHTAQTQTHREDY | |
| | NSTLRVVSALPIQHQDWMSGKEFK | |
| | CKVNNKDLPAPIERTISKPKGSVRAP | |
| | QVYVLPPPEEEMTKKQVTLTCMVT | |
| | DFMPEDIYVEWTNNGKTELNYKNT | |
| | EPVLDSDGSYFMYSKLRVEKKNWV | |
| | ERNSYSCSVVHEGLHNHHTTKSFSR | |
| | TPGK (SEQ ID NO: 126) | |
| I23RB93 | QVQLKESGPGLVQPSQSLSITCTVSG | DIKMTQSPATLSVTPGDSVSLFCRASQSIS |
| | FSLTSYGVHWVRQSPGKGLEWLGV | NNLHWYQQKSHESPRLLIKYASQSISGIPS |
| | IWSGVSTDYNAAFISRLSISKDNSKS | RFSGSGSGTDFTLSINSVETEDFGMYFCQ |
| | QVFFKMNSLQADDTAIYYCARSRG | QSNSWPLTFGGGTKLEIKRADAAPTVSIF |
| | SYYFDYWGQGTTLTVSSAKTTAPS | PPSSEQLTSGGASVVCFLNNFYPKDINVK |
| | VYPLAPVCGDTTGSSVTLGCLVKG | WKIDGSERQNGVLNSWTDQDSKDSTYS |
| | YFPEPVTLTWNSGSLSSGVHTFPAV | MSSTLTLTKDEYERHNSYTCEATHKTSTS |
| | LQSDLYTLSSSVTVTSSTWPSQSITC | PIVKSFNRNEC (SEQ ID NO: 129) |
| | NVAHPASSTKVDKKIEPRGPTIKPCP | |
| | PCKCPAPNLLGGPSVFIFPPKIKDVL | |
| | MISLSPIVTCVVVDVSEDDPDVQIS | |
| | WFVNNVEVHTAQTQTHREDYNSTL | |
| | RVVSALPIQHQDWMSGKEFKCKVN | |
| | NKDLPAPIERTISKPKGSVRAPQVYV | |
| | LPPPEEEMTKKQVTLTCMVTDFMPE | |
| | DIYVEWTNNGKTELNYKNTEPVLD | |
| | SDGSYFMYSKLRVEKKNWVERNSY | |
| | SCSVVHEGLHNHHTTKSFSRTPGK | |
| | (SEQ ID NO: 128) | |
| I23RB94 | DVQLQESGPELKKPGETVKISCKAS | DIVMTQSHKFMSTSVGDRVSITCKASQD |
| | GYTFTNYGMNWVRQAPGKSLKWM | VNTAVAWYQQKPGQSPKLLIYSAFYRYP |
| | GWINTNTGEPAYAEEFKGRFAFSLE | GVPDRFTGSGSGTDFTFTINSVQAEDLAV |
| | TSASTAYLQINNLKNEDMATYFCAR | YCCQQHYTSPLTFGDGTRLEIKRADAAPT |
| | VRQTARATRGYFDVWGTGTTVTVS | VSIFPPSSEQLTSGGASVVCFLNNFYPKDI |
| | SAKTTAPSVYPLAPVCGDTTGSSVT | NVKWKIDGSERQNGVLNSWTDQDSKDS |
| | LGCLVKGYFPEPVTLTWNSGSLSSG | TYSMSSTLTLTKDEYERHNSYTCEATHKT |
| | VHTFPAVLQSDLYTLSSSVTVTSST | STSPIVKSFNRNEC (SEQ ID NO: 131) |
| | WPSQSITCNVAHPASSTKVDKKIEP | |
| | RGPTIKPCPPCKCPAPNLLGGPSVFIF | |
| | PPKIKDVLMISLSPIVTCVVVDVSED | |
| | DPDVQISWFVNNVEVHTAQTQTHR | |
| | EDYNSTLRVVSALPIQHQDWMSGK | |
| | EFKCKVNNKDLPAPIERTISKPKGSV | |
| | RAPQVYVLPPPEEEMTKKQVTLTC | |
| | MVTDFMPEDIYVEWTNNGKTELNY | |
| | KNTEPVLDSDGSYFMYSKLRVEKK | |
| | NWVERNSYSCSVVHEGLHNHHTTK | |
| | SFSRTPGK (SEQ ID NO: 130) | |
| I23RB95 | EVKLVESGGGLVQPGSSMKLSCTAS | DIVLTQSHKFMSTSVGDRVSITCKASQDV |
| | GFTFSDYYMAWVRQVPEKGLEWV | GTAVAWYQQKPGQSPKLLIYWASTRHTG |
| | ANINYDGSNTYYLDSLKSRFIISRDN | VPDRFTGSGSGTDFTLTISNVQSEDLADY |
| | AKNILYLQMSSLKSEDTATYYCARE | FCQQYSTYPYTVGGGTKLEIKRADAAPT |
| | GYDEAMDYWGQGTTLTVSSAKTT | VSIFPPSSEQLTSGGASVVCFLNNFYPKDI |
| | APSVYPLAPVCGDTTGSSVTLGCLV | NVKWKIDGSERQNGVLNSWTDQDSKDS |
| | KGYFPEPVTLTWNSGSLSSGVHTFP | TYSMSSTLTLTKDEYERHNSYTCEATHKT |
| | AVLQSDLYTLSSSVTVTSSTWPSQSI | STSPIVKSFNRNEC (SEQ ID NO: 133) |
| | TCNVAHPASSTKVDKKIEPRGPTIKP | |
| | CPPCKCPAPNLLGGPSVFIFPPKIKD | |
| | VLMISLSPIVTCVVVDVSEDDPDVQI | |
| | SWFVNNVEVHTAQTQTHREDYNST | |
| | LRVVSALPIQHQDWMSGKEFKCKV | |
| | NNKDLPAPIERTISKPKGSVRAPQVY | |
| | VLPPPEEEMTKKQVTLTCMVTDFM | |
| | PEDIYVEWTNNGKTELNYKNTEPVL | |
| | DSDGSYFMYSKLRVEKKNWVERNS | |
| | YSCSVVHEGLHNHHTTKSFSRTPGK | |
| | (SEQ ID NO: 132) | |
| I23RB98 | EFQLQQSGPELVKPGASVKMSCKAS | DIVLTQSPAIMSASLGERVTMTCTASSSVS |
| | GYTFTNYYMHWVKQSHGKTIEWIG | SSYLHWYQQKPGSSPKLWIYSTSNLASG |
| | YIYPNSGDTSYNQKFKGKATLTVDK | VPARFSGSGSGTSYSLTISSMEAEDAATY |
| | SSSTAYMELRSLTSEDSAVYTCARF | YCHQYHRSPFTFGSGTKLEMKRADAAPT |
| | GGFYDAMDYWGQGTTVTVSSAKT | VSIFPPSSEQLTSGGASVVCFLNNFYPKDI |
| | TAPSVYPLAPVCGDTTGSSVTLGCL | NVKWKIDGSERQNGVLNSWTDQDSKDS |
| | VKGYFPEPVTLTWNSGSLSSGVHTF | TYSMSSTLTLTKDEYERHNSYTCEATHKT |
| | PAVLQSDLYTLSSSVTVTSSTWPSQS | STSPIVKSFNRNEC (SEQ ID NO: 135) |
| | ITCNVAHPASSTKVDKKIEPRGPTIK | |
| | PCPPCKCPAPNLLGGPSVFIFPPKIKD | |
| | VLMISLSPIVTCVVVDVSEDDPDVQI | |
| | SWFVNNVEVHTAQTQTHREDYNST | |
| | LRVVSALPIQHQDWMSGKEFKCKV | |
| | NNKDLPAPIERTISKPKGSVRAPQVY | |
| | VLPPPEEEMTKKQVTLTCMVTDFM | |
| | PEDIYVEWTNNGKTELNYKNTEPVL | |
| | DSDGSYFMYSKLRVEKKNWVERNS | |
| | YSCSVVHEGLHNHHTTKSFSRTPGK | |
| | (SEQ ID NO: 134) | |

TABLE 5
VH and VL AA Sequences of Exemplary Immunization Based IL-23R Antibodies

| Name | VH AA Seq | VL AA Seq |
|---|---|---|
| I23RB101 | EVQLQQSGAEVKKPGSSVKVSCKA | DIVMTQSHKFMSTSIGDRVSITCKTSQDV |
| | SGGTFSSYAISWVRQAPGQGLEWM | RTAVAWYQQKPGQSPKLLIYSASYRYIG |
| | GWINPNSGGTNYAQKFQGRVTMTR | VPDRFTGSGSGTDFTFTISDVQAEDLALY |
| | DTSISTAYMELSRLRSDDTAVYYCA | YCQQHYSTPYTFGGGTKLEIK (SEQ ID |
| | RGYRYGPLDGFDIWGQGTTLTVSS | NO: 137) |
| | (SEQ ID NO: 136) | |
| I23RB102 | QVQLQQPGAELVKPGASVKVSCKA | DIQMTQSPASLSVSVGETVTITCRASENIY |
| | SGYTFTKYWINWMNQRPGQGLEWI | SHITWYQLKQGKSPQLLVYASTNLADDV |
| | GNIYPGSISTNYNEKFKSKVTLTVDI | PSRFSGSGSGTQYSLKINSLLSEDFGTYYC |
| | SSSTAYMQLSSLTSDDSAVYYCARG | QHFWGTPWTFGGGTKLEMK (SEQ ID |
| | DFYALDYWGQGTTLTVSS (SEQ ID | NO: 139) |
| | NO: 138) | |
| I23RB104 | EVKLVESGGGLVKPGGSLKLSCAAS | DIQMTQSPASLSVSVGETVTITCRASENIY |
| | GFTFSSYAMSWVRQTPEKRLDWVA | SNLAWYQQKQGKSPQLLVYAATNLADG |
| | SISTGGSTYYPDSVKGGFTISRDIAR | VPSRFSGSGSGTQYSLKINSLQSEDFGSYY |
| | NTLSLQMTSLRSEDTAMYYCARGP | CQHFWGTPPTFGSGTKLEIK (SEQ ID |
| | HYYGGSYPFAYWGQGTTLTVSS | NO: 141) |
| | (SEQ ID NO: 140) | |
| I23RB144 | EVQLQQSGPELVKPGASVKMSCKA | DIVMTQSPLTLSVIIGQSASISCKSSQSLLD |
| | SGYTFTSYIIHWVKQKPGQGLEWIG | SDGKTYLNWLLQRPGQSPKRLMYLVSKL |
| | YIDPYNDDTKYNEKFKGKATLTSD | DSGVPDRFTGSGSGTDFTLKISRVEAEDL |
| | KSSSTAYMEFSSLTSEDSAVYYCAR | GVYYCWQGIHFPLTFGSGTRLEIK (SEQ |
| | LGSINYYDGSYFDYWGQGTSVTVSS | ID NO: 143) |
| | (SEQ ID NO: 142) | |
| I23RB148 | DVQLQESGPDLVKPSQSLSLTCTVT | DIVMTQSHKFMSTSVGDRVSLTCKASQE |
| | GYSITSGYNWHWIRQFPGNKLEWM | VRTAVAWYQQKPGQPPKLLIYSASYRYT |
| | GYIHSSGTTNYSPSLRSRLSITRDTSK | GVPDRFTGSGSGTDFTFTIISVQAEDLAVY |
| | NQFFLQLNSVTTEDTATYYCTRQLG | YCQQHYTTPYSFGSGTKLEIK (SEQ ID |
| | LKAMEYWGQGTTLTVSS (SEQ ID | NO: 145) |
| | NO: 144) | |
| I23RB149 | DVQLQESGPDLVKPSQSLSLTCTVT | DVQMIQSPLSLPVSLGDQASISCRSSQSLV |
| | GYSITSGYNWHWIRQFPGNKLEWM | HSNGNTYLHWYLQKPGQSPKLLIYKVSN |
| | GYIHFSDRTNYNPSLKSRISITRDTSK | RFSGVPDRFSGSGSGTDFTLKISRVEAEDL |
| | NQFFLQLNSVTSEDTATYYCSRQLG | GVYFCSQSTHVPLTFGAGTRLEIK (SEQ |
| | LKALDYWGQGTTLTVSS (SEQ ID | ID NO: 147) |
| | NO: 146) | |
| I23RB150 | QIQLVQSGPELKKPGETVKISCKASA | DIVMTQSHKFMSTSVGGRVSITCKASQD |
| | YTFTNYGMNWVKQAPGKGLKWM | VSTAVAWYQQKPGQSPRLLIYSASYRYT |
| | GWIKTNTGEPTYAEEFKGRFAFSLE | GVPDRFTGSGSGTDFTFTISSVQAEDLAV |
| | TSASTAYLQINNLKNEDTATYFCAR | FYCQQHYSTPYTFGSGTRLEIK (SEQ ID |
| | SRQLGLRYYFDYWGQGTTLTVSS | NO: 149) |
| | (SEQ ID NO: 148) | |
| I23RB153 | EVKLVESGGGLVQPGGSLKLSCAAS | DIVMTQSHRFMSTSVGERVSITCKASQDV |
| | GFTFSSDTMSWVRQTPEKRLELVAE | GNAVAWYQQKPGQSPKLLIYWTSTRHN |
| | ISSNGGSTYHIDTVKGRFTISRDNAK | GVPDRFTGSGSGTDFTLTISNVQGEDLAD |
| | NTLYLQMSSLKSEDTAMYYCASPG | YFCQQYNRYPLTFGSGTKLEIK (SEQ ID |
| | YPWFAYWGQGTTVTVSA (SEQ ID | NO: 151) |
| | NO: 150) | |
| I23RB155 | QVQLKESGPGLVKPSQSLSLTCSVT | QIVLSQSPASLAVSLGQRATISCRTSESVD |
| | GYSITSGHSWNWIRQFPGNKLEWM | TYGNSFIYWYQQKPGQPPKLLIYRASNLE |
| | GYISYDGTNDYNPSLKNRISITRDTS | SGIPARFSGSGSRTDFTLTINPVEADDVAT |
| | KNQFFLNLNSVTTEDTVTYYCARG | YYCQQGNKDPYTFGSGTKLEMK (SEQ ID |
| | GGYYGGTYRVFADWGQGTTLTVSS | NO: 153) |
| | (SEQ ID NO: 152) | |
| I23RB156 | QVQLKESGPGLVAPSQSLSITCTVSG | DIVMTQSHKFMSTSVGDRVSITCKASQD |
| | FSLTSYAINWVRQPPGKGLEWLGVI | VSTAVAWYQQKPGRSPKLLIYSAFYRYT |
| | WTGGGTNYNSVFKSRLSISKDNSKS | GVPDRFTGSGSGTDFTFTIGSVQAEDLAV |
| | QIFLKMISLQTDDTARYYCARNRDY | YYCQQHYSIPLTFGAGTKLELK (SEQ ID |
| | SNYRWYFDVWGAGTTLTVSS (SEQ | NO: 155) |
| | ID NO: 154) | |
| I23RB157 | EVKLVESGGGSVKPGGSLKLSCAAS | DIVMTQSPASLAVSLGQRATISCRASESV |
| | GFTFSRYTMSWVRQTPEKRLEWVA | DNYGISFMNWFQQKPGQPPKLLIYAASN |
| | YISTGGGDTYYPDSVKGRFTISRDN | QGSGVPARFSGSGSGTDFSLNIHPMEEDD |
| | ARNTLYLQMSSLRSEDTAMYYCAR | TAMYFCQQSKEVPWTFGAGTKLELK |
| | RTSYSYYNYVFDYWGQGTTLTVSS | (SEQ ID NO: 157) |
| | (SEQ ID NO: 156) | |
| I23RB159 | EVQLQQSGGGLVKPGGSLKLSCAA | DIVMTQTTSSLSASLGDRVTISCRASQDIS |
| | SGFTFSDYGMAWVRQTPRKGPEWI | NYLNWYQQKPDGTVKLLIYYTSRLHSGV |
| | AFISNLAYSVYYSDTVTGRFTISREN | PSRFSGSGSGTDYSLTISNLEQEDIATYFC |
| | AKNTLYLEMSSLRSEDTAMYYCAR | QQGNTLPWTFGAGTKLELK (SEQ ID |
| | HGDYRNYGFAYWGLGTTVTVSS | NO: 159) |
| | (SEQ ID NO: 158) | |
| I23RB160 | QVQLKESGPDLVKPSQSLSLTCTVT | DIVMTQSHKFMSTSVGDRVSITCKASQD |
| | GYSITSGYNWHWIRQFPGNKLEWM | VRTAVAWYQQKPGQSPKLLIHSASYRYT |
| | GYIHYSSGTIYNPSLKSRISITRDTSK | GVPDRFTGSGSGTDFTFTISSVQVEDLAV |
| | NQFFLQLNSVTTEDTGTYYCARQLG | YYCQQHYTTPYTFGSGTKLEIK (SEQ ID |
| | LKAMDYWGQGTSVTVSS (SEQ ID | NO: 161) |
| | NO: 160) | |
| I23RB161 | EFQLQQSGPELVKPGASVKISCKAS | DIVMTQSPAILSASPGEKVTMTCRASSSV |
| | VYAFSSSWMNWVKQRPGKGLEWI | SYMHWYQQKPGSSPKPWIYATSDLASGA |
| | GRIYPGDGDTNYNGKFKGKATLTA | PARFSGSGSGTSYSLTISRVEAEDAATYY |
| | DKSSSTAYMQLSSLTSEDSAVYFCA | CQQWSSNPPTFGGGTKLEIK (SEQ ID |
| | RRYDFGSAMDYWGQGTSVTVSS | NO: 163) |
| | (SEQ ID NO: 162) | |
| I23RB162 | EFQLQQSGPELVKPGASVKMSCKAS | DIVMTQSQKFMSTSVGDRVSVTCKASQN |
| | GYTFTNYVMHWVKQKPGQGLEWI | VGTNVAWYQQKPGQSPKALIYSASYRYS |
| | GYINPYNDGTKYNEKFKGKATLTS | GVPDRFTGSGSGTDFTLTISNVQSEDLAE |
| | DKSSSTAYMELSSLTSEDSAVYYCA | YFCQQYNSYPFTFGSGTKLEIK (SEQ ID |
| | RSRTGTRWYFDVWGAGTTVTVSS | NO: 165) |
| | (SEQ ID NO: 164) | |
| I23RB165 | EVQLQQSGAELVRPGASVKLSCTAS | DIVMTQSPASLAVSLGQRATISCRASKSV |
| | GFNIKDSLMHWVKQRPEQGLEWIG | STSGYSYMHWYQQKPGQPPKLLIYLASN |
| | WIDPEDGKTKYAPKFQDKATITADT | LESGVPARFSGSGSGTDFTLNIHPVEEEDA |
| | SSNTAYLQLSSLTSEDTAIYYCARRE | ATYYCQHSRELPLTFGAGTKLEMK (SEQ |
| | VLDYFDYWGQGTTLTVSS (SEQ ID | ID NO: 167) |
| | NO: 166) | |
| I23RB166 | DVQLQESGPGLVKPSQTVSLTCTVT | DIVMTQSHKFMSTSVGARVSITCKASQD |
| | GYSITNGNHWWNWIRQVSGSKLEW | VSTAVAWYQQKPGQSPKLLIYSASYRYT |
| | IGYIRSSGSTDSNPSLKSRISITRDTSK | GVPDRFTGSGSGTDFTFTISSVQAEDLAV |
| | NQLFLQLNSVTAEDIATYYCARERL | YYCQQHYSTPRTFGGGTKLEIK (SEQ ID |
| | RLRWSYFDYWGQGTTLTVSS (SEQ | NO: 169) |
| | ID NO: 168) | |
| I23RB168 | QIQLVQSGPELVKPGASVKMSCKTS | DIQMTQSSSSFSVSLGDRVTITCKASEDLY |
| | GYTFTDYYINWVKQRPGQGLEWIG | NRLAWYQQKPGNAPRLLISGATSLGTGV |
| | WIYPAINNTNYNEKFKGKATLTVDT | LSRFSGSGSGKDYTLSITSLQTEDVATYY |
| | SSRTAYMQLNSLTSEDSAVYFCAIS | CQQYWSIPWTFGAGTKLELK (SEQ ID |
| | RKPYFDYWGQGTTLTVSS (SEQ ID | NO: 171) |
| | NO: 170) | |
| I23RB16 | QIQLVQSGPELKKPGETVKISCKASG | DIKMTQSPASLAVSLGQRATISCRASKSV |
| 9 | YTFTTVGMQWVQKMPGKGFKWIG | STSDYSYMHWYQQKPGQPPKLLIYLASN |
| | WINTHSGEPKYTDDFKGRFAFSLET | LESGVPARFSGSGSGTDFTLNIHPVEEEDA |
| | SASTAYLQISNLKSEDTATYFCARSS | ATYYCQHSRELPRTFGAGTKLELK (SEQ |
| | ALTGAFAYWGQGTLVTVSS (SEQ | ID NO: 173) |
| | ID NO: 172) | |
| I23RB173 | DVQLQESGPGLVKPSQSLSLTCSVT | DIKMTQSPAIMSASPGEKVTITCSASSSVS |
| | GYSITSGYYWNWIRQFPGNKLEWM | YMHWFQQKPGTSPKLWIYSTSNLASGVP |
| | GYISYDGGNNYNPSLKNRISITRDTS | ARFSGSGSGTSYSLTISRMEAEDAATYYC |
| | KNQFFLKLNSVTTEDTATYYCARD | QQRSSYPLTFGDGTKLEMK (SEQ ID |
| | AGLLPYYAMDYWGQGTTLTVSS | NO: 175) |
| | (SEQ ID NO: 174) | |
| I23RB177 | EVQLQQSGPELLKPGASVKISCKAS | NTQMTQSPSSMYASLGERVTITCKASQDI |
| | GYTITDYTMHWVKQSHGKSLEWIG | NSYLSWFQQKPGKSPKALIYRANRLVDG |
| | GINPNYGGTSYNEKFKDKATLTVD | VPSRFSGSGSGQDYSLTISSLEYEDMGIYY |
| | KSSSTAYMELRSLTSEDSAVFYCVR | CQQYDEFPRTFGAGTKLELK (SEQ ID |
| | GNIYFDYWGQGTTLTVSS (SEQ ID | NO: 177) |
| | NO: 176) | |
| I23RB180 | QVTLKESGPGILQPSQTLSLTCSFSG | DIQMTQSPASLSASVGETVTITCRASVNIH |
| | FSLSTYGMGVGWIRQPSGKGLEWL | NYLAWYQQKQGKSPQLLVYNAKTLADG |
| | ANIWWNDSKYHNAALKSRLTISKD | VPSRFSGSGSGTQYSLKINSLQPEDFGSYY |
| | TSKNQVFLKIASVDTADTATYYCGR | CQHFWTTPYMYTFGAGTKLELK (SEQ ID |
| | IDGYYECVDVWGTGTSVTVSS (SEQ | NO: 179) |
| | ID NO: 178) | |
| I23RB182 | EVQLQQSGPGLVKPSQSLSLTCSVT | DIVMTQSPAIMSASLGEKVTMSCRASSSV |
| | GYSITSGYFWNWLRQFPGSKLEWM | NYMYWYQQKSDASPKLWIYYTSNLAPG |
| | GFIDNDGSNDYNPSLKNRISITRDTS | VPARFSGSGSGNSYSLTISSMEGEDAATY |
| | KNQFFLRLNSVTTEDTATYYCARGR | YCQQFTNSPWTFGAGTKLELK (SEQ ID |
| | LGFFDSWGPGTTLTVSS (SEQ ID | NO: 181) |
| | NO: 180) | |
| I23RB188 | QIQLVQSGPELKKPGETVKISCKASG | DVQMIQSPSSLSASLGERVSLTCRASQEIS |
| | YTFTNYGMNWVKQAPGKGLKWM | GNLSWLQQKPDGTIKRLIYAASTLDSGVP |
| | GWINTYTGAPTYADDFKGRFAFSLE | KRFSGSRSGSDYSLTISSLESEDFADYYCL |
| | TSASTAYLQINNFKNEDTATYFCAR | QYASYPWTFGAGTRLEIK (SEQ ID |
| | GNGYPYYYGINYWGQGTSVTVSS | NO: 183) |
| | (SEQ ID NO: 182) | |
| I23RB189 | DVQLQESGPDLVKPSQSLSLTCTVT | DIVLTQSPKSMSMSVGERVTLSCKASENV |
| | GYSITSGYNWHWIRQFPGNKLEWM | GTYVSWYQQKPEQSPKLLMYGASNRYT |
| | GYIHSSGTTNYSPSLRSRLSITRDTSK | GVPDRFTGSGSATDFTLTISSVQAEDLAD |
| | NQFFLQLNSVTTEDTATYYCTRQLG | YHCGQSYSYPPTFGGGTKLEIK (SEQ ID |
| | LKAMEYWGQGTTLTVSS (SEQ ID | NO: 185) |
| | NO: 184) | |
| I23RB27 | QVQLKESGPDLVQPSQTLSLTCTVS | DIQMTQSPTSLAVSLGQRATISCRASESVE |
| | GFSLTSYGVHWVRQPPGKGLEWVG | YYGTSLMHWYQQKPGQPPKLLIYAASNV |
| | TLGWDDKKSYNSALKSRLSISRDTS | ESGVPARFSGSGSGTDFSLNIHPVEEEDIA |
| | KSQVFLKLSSLQTEDTAMYYCTKE | MYFCQQGKKVPWTFGAGTKLEMK (SEQ |
| | DVSYAMDFWGQGTTLTVSS (SEQ | ID NO: 187) |
| | ID NO: 186) | |
| I23RB30 | QVTLKESGPGILQPSQTLSLTCSFSG | DIVLTQSQRFMSTSVGDRVSITCKASQNIR |
| | FSLSTSGMGVSWIRQPSGKGLEWLA | TAVAWYQQKPGQSPKALIYLPSNRHTGV |
| | HIYWDDDKRYNPSLKSRLTISKDTS | PDRFTGSGSGTDFTLTISNVQSEDLADYF |
| | SNQIFLKITSVDTADTATYYCARRTL | CLQHWNYPLTFGAGTKLELK (SEQ ID |
| | GGPPFDYWGQGTTLTVSS (SEQ ID | NO: 189) |
| | NO: 188) | |
| I23RB31 | EFQLQQSGAEMVRPGASVKLSCKA | DIVLTQSPATLSVTPGDRVSLSCRASQSIS |
| | SGYTFTGYWMNWVKQRPGQGLEW | DHLHWYQQKSHESPRLLIKFASQSISGIPS |
| | IGKIDPSDTETHYNQNFKDKATLTV | RFSGSGSGSDFTLSIDSVEPEDVGVYYCQ |
| | DKSSSTAYMQLNSLTSEDSAVYYC | NGHSFPLTFGSGTKLEIK (SEQ ID NO: 191) |
| | ARWGLGRNFAMDYWGQGTTLTVS | |
| | S (SEQ ID NO: 190) | |
| I23RB32 | EFQLQQSGPELVKPGASVKLSCKAS | DIVMTQSPSSLTVTAGEKVTMSCKSSQSL |
| | GYTFTDYALHWVKQSPGQGLEWIG | LNSGNQKNYLTWYQQKPGQPPKLLIYW |
| | WIYPGGGNTYYNDKFKGKATMTA | ASTRESGVPDRFTGSGSGTDFTLTISSVQA |
| | DKSSSTAYMQLSSLTSEDSAVYFCA | EDLAVYYCQNDYTYPLTFGSGTKLEIK |
| | RGRLRRDYPMDYWGQGTSVTVSS | (SEQ ID NO: 193) |
| | (SEQ ID NO: 192) | |
| I23RB33 | EVQLQQSGAELVKPGASVKLSCTAS | DIVLTQSPAIMSASPGEKVTMTCRASSSV |
| | GFNIRDIYIHWVKQRPEQGLEWIGRI | RSSYLHWYQQKSGASPKLWIYSTSNLAS |
| | DPANGHSIYAAKFQGKATITADTSL | GVPARFSGSGSGTSYSLTITSVEAEDAAT |
| | NIAYMQLSSLTSGDTAVYYCARGS | YYCQQYTGNPIFTFGSGTKLELK (SEQ ID |
| | DNDYGRVLAYWGLGTSVTVSS | NO: 195) |
| | (SEQ ID NO: 194) | |
| I23RB35 | DVQLQESGPGLVKPSQSLSLTCSVT | DIVLTQSPASLAVSLGQRATISCRASESVD |
| | GYSITSGHNWNWIRQFPGNKLEWL | SYGNSFMHWYQQKPGQPPKLLIYRASNL |
| | GYISYDGSNNYDPSLKNRISITRDTS | ESEIPARFSGRGSGTDFTLTINPVEADDVA |
| | KNQFFLKLNSVTTEDTATYYCARG | TYYCQQSNADPYTFGGGTKLEIK (SEQ ID |
| | GGYFGNSYRVFASWGQGTTVTVSS | NO: 197) |
| | (SEQ ID NO: 196) | |
| I23RB36 | QIQLVQSGAELVKPGASVKLSCTTS | DIVMTQSPKSMSMSVGERVTLSCKASEN |
| | GFNIKDTYIHWMKQRPEQGLEWIG | VGTSVSWFQQKPEQSPKLLIYGASNRYTG |
| | RIDPANGNTIYASKFQGKATLTTDT | VPDRFTGSGSATDFTLTISSVQAEDLADY |
| | SSNTAYMLLSSLTSGDTAVYYCTRG | HCGQSYSYPRTFGGGTKLEIK (SEQ ID |
| | TSWFAYWGQGTTVTVSS (SEQ ID | NO: 199) |
| | NO: 198) | |
| I23RB39 | EVQLQQSGPELVKPGAPVKISCKAS | DIQMTQSHKFMSTSVGDRVSITCKASQD |
| | GYTFTNYYIHWVKQRPGQGLEWIG | VSTAVAWYQQKPGQSPKLLIYSAFYRYT |
| | YIYPGNGGTAYNQKFKDKATLTAD | GVPDRFTGSGSGTDFTFTISSVQAEDLAV |
| | NPSSTAYMQLSSLTSEDSAVYFCAR | YYCQQHYSSPRTFGAGTKLELK (SEQ ID |
| | SRGGSRNYFDYWGQGTTLTVSS | NO: 201) |
| | (SEQ ID NO: 200) | |
| I23RB42 | EVQLQQSGAELVKPGASVKISCKAS | DIVLTQTAPSVPVTPGESVSISCRSSKSLL |
| | GYSFTDYIMNWVKQSHGKSLEWIG | HSNGNTYLYWFLQRPGQSPQLLIYRMSN |
| | NINPYFGFTSYNQEFKGKATLTVDK | LASGVPDRFSGSGSGTAFTLRISRVEAED |
| | SSSTAYMLLNSLTSEDSAVYYCSRG | VGVYYCMQHLEYPYTFGSGTRLEIK (SEQ |
| | SYYGYETFFDYWGQGTTLTVSS | ID NO: 203) |
| | (SEQ ID NO: 202) | |
| I23RB45 | QVTLKESGPGILQPSQTLSLTCSFSG | DIVLTQSQKFISTSVGDRVSITCKASQNVR |
| | FSLSTYGMGVSWIRQPSGKGLEWL | TAVAWYQQKPGQSPKLLIYLPSNRHTGV |
| | AHIYWDDDKRYNPSLKSRLTISKDT | PDRFTGSGSGTVFTLTISNVQSEDQADYF |
| | SNNQVFLKITSVDTADTATYYCAQR | CLQHWNYPLTFGAGTKLELK (SEQ ID |
| | ALPLLGQKAPFDYWGQGTTLTVSS | NO: 205) |
| | (SEQ ID NO: 204) | |
| I23RB47 | QVQLKESGPGLVAPSQSLSITCTVSG | DIVLTQSPASQSASLGESVTITCLASQTIGS |
| | FSLTNYDIHWVRQSPGKGLEWLGVI | WLAWYQQKPGKSPQLLIYAATRLADGVP |
| | WSDGRTDYKGAFISRLSISKDNSKS | SRFSGSGSGTKFSFKISSLQAEDFVFYYCH |
| | QVFFKMNSLQADDTAIYYCARNNY | QLYSIPLTFGGGTKLEMK (SEQ ID |
| | YRYGRNTMDYWGQGTSVTVSS | NO: 207) |
| | (SEQ ID NO: 206) | |
| I23RB51 | QVQLQQSGPDLVKPSQSLSLTCTVT | DIVLTQSPASLSASVGETVTITCRASGNIH |
| | GYSITSGYNWHWIRQFPGNKLEWM | NYLAWYQHKQGKSPQLLVYNAKTLADG |
| | GYVHYRDSTHYNPSLKSRISITRDTS | VPSRFSGSGSGTQYSLKINSLQPEDFGSYY |
| | KNQFFLQLNSVTTEDTATYYCARQL | CQYFWTTRTFGAGTKLELK (SEQ ID |
| | GLKAMDYWGQGTSVTVSS (SEQ ID | NO: 209) |
| | NO: 208) | |
| I23RB54 | EVQLQQSGGGLVKPGGSLKLSCAA | DIQMTQSPKFLLVSAGDRVTITCKASQSV |
| | SGFTFSSYAMSWVRQTPEKRLEWV | SNDVAWYQQKPGQSPRLLIYYASNRYTG |
| | AGISSGGSYIYYPDNVKGRFTISRDN | VPDRFTGSGYGTDFTFTISTVQAEDLAVY |
| | ARNTLYLQMSSLRSEDTAMYYCAR | FCQQDYSSLPTFGAGTKLEMK (SEQ ID |
| | KKSDYGAMDYWGQGTTLTVSS | NO: 211) |
| | (SEQ ID NO: 210) | |
| I23RB56 | EVKLVESGGGLVKPGGSLKLSCAAS | DIVMTQSPKFLLVSAGDRVTITCKASQSV |
| | GFTFSSYAMSWVRQTPEKRLEWVA | SNDVAWYQQKPGQSPKLLIYYASNRYTG |
| | AINSNDGSTYYPDTVKDRFTISRDN | VPDRFTGSGYGTVFTFTISTVQAEDLAVY |
| | AKNTLYLQMSSLRSEDTALYYCAR | FCQQDYSSPFTFGSGTKLEIK (SEQ ID |
| | HFLYFSNFYYFDYWGQGTTLTVSS | NO: 213) |
| | (SEQ ID NO: 212) | |
| I23RB57 | EFQLQQSGPELVKPGASVKMSCKAS | DIVMTQSPAIMSASLGERVTMTCTASSSV |
| | GYTFTNYYMHWVKQSHGKTIEWIG | SSSYLHWYQQKPGSSPKLWIYSTSNLASG |
| | YIYPNSGDTSYNQKFKGKATLTVDK | VPARFSGSGSGTSYSLTISSMEAEDAATY |
| | SSSTAYMELRSLTSEDSAVYNCARF | YCHQYHRSPFTFGSGTKLEIK (SEQ ID |
| | GGFYDAMDYWGQGTSVTVSS (SEQ | NO: 215) |
| | ID NO: 214) | |
| I23RB58 | EVKLVESGGGLVKPGGSLKLSCAAS | DIVMTQTPASLAVSLGQRATISCRASESV |
| | GFSFIIYTMSWVRQTPEKRLEWVAY | DSYGNSFMHWYQQKPGQPPKLLIYRASN |
| | ITSGGGITYYPDSVKGRFTISRDNAR | LESGIPARFSGSGSRTDFTLTINPVEADDV |
| | NTLYLQMSSLRSEDTAMYYCARHE | ATYYCQQSNEDPLTFGAGTKLEMK (SEQ |
| | GDYYDDYYRIGYAMDYWGQGTSV | ID NO: 217) |
| | TVSS (SEQ ID NO: 216) | |
| I23RB60 | DVQLQESGPELVKPGDSVKMSCEA | DIVMTQSTSSLSASLGDRVTISCRASQDIR |
| | SGYTFTDYYIDWVKQSHGKSLEWI | NNLNWYQQKPDGTVKLLIFYSSRLHSGV |
| | GYIYPNNGGISFNQKFEGKATLTVD | PSRFSGSGSGTDYSLTISNLEQEDIATYFC |
| | KSSSTAYMELHSLTSEDSAVYYCAR | QQGHTLPWTFGAGTKLELK (SEQ ID |
| | EKLRGRDYWGQGTTLTVSS (SEQ | NO: 219) |
| | ID NO: 218) | |
| I23RB61 | DVQLQESGAELVKPGASVKLSCKSF | DIQMTQSHKFLSTSVGDRITITCKASQDVI |
| | DYTFTSFDINWMKQRPGQGLEWIG | TAVAWYQQKSGQSPKLLIYWASTRHTGV |
| | WIFPGSGTTNYNEKFKGKATLTADK | PDRFTGSGSGTDYTLTISNVQAEDLALYY |
| | SSSTAYMHLTSLTSEDSAVYFCARR | CQQHYTTPPTFGAGTKLELK (SEQ ID |
| | LTGTRYFDVWGTGTTLTVSS (SEQ | NO: 221) |
| | ID NO: 220) | |
| I23RB65 | EVQLQQSGPELVKPGASVKISCKAS | QIVLTQSPASLAVSLGQRATISCRASQSVS |
| | GYTFTDHTMDWVKQSHGKSLEWIG | TSSYNYIHWYQQKPGQPPKLLIKYASNLE |
| | YIYPKSGNAAYSQKFKSEATLTVDK | SGVPARFSGSGSGTDFTLNIHPVEEDDTA |
| | SSSTAYMEFHSLTSEDSAVYYCAR | TYYCQHTWEIPYTFGSGTKLEIK (SEQ ID |
| | WGLRRDGFTYWGQGTSVTVSS | NO: 223) |
| | (SEQ ID NO: 222) | |
| I23RB66 | QVTLKESGPGILQPSQTLSLTCSFSG | DIVMTQSHKFMSTSVGDRVSITCKASQD |
| | FSLSTSNMGIGWIRQPSGKGLEWLA | VSTAVAWYQQKPGQSPKLLIYSASYRYT |
| | HIWWNSDKYYNPSLKSRLTISKDTS | GVPDRFTGSGSGTDFTFTFSSVQAEDLAV |
| | NNQVFLTITSVDTADTATYYCAQIR | YYCQQHYSTPYTFGGGTKLEIK (SEQ ID |
| | WLRFYFDYWGQGTTVTVSS (SEQ | NO: 225) |
| | ID NO: 224) | |
| I23RB67 | EVQLQQSGAELVKPGASVKLSCKA | DVVMTQSHKFMSTSVGDRVSITCKASQD |
| | SGYTFTSYWINWVKQRPGQGLEWI | VSTAVAWYQQKPGQSPKLLIYSAFYRYT |
| | GNIYPGSSSTNYNEKFKSKATLTVD | GVPDRFTGSGSGTDFTFTISSVQAEDLAV |
| | TSSSTAYMQLSSLTSDDSAVYYCAR | YYCQQHYSTPYTFGGGTKLELK (SEQ ID |
| | SAYGNRLAMDYWGQGTTLTVSS | NO: 227) |
| | (SEQ ID NO: 226) | |
| I23RB69 | EVQLQQSGAELVKPGASVKISCKAS | DIVMTQSHKFMSTSVGDRVSITCKASQD |
| | GYSFTGYNMNWVKQSHGKSLEWIG | VSTAVAWYQQKPGQSPKLLIYSASYRYT |
| | NINPFYDKTSYNQKFKGKATLTVDK | GVPDRFTGSGSGTDFTFTISSVQAEDLAV |
| | ASSTAYMQLNSLTSEDSAVYYCAR | YYCQQHYSTPWTFGGGTKLEMK (SEQ ID |
| | QLGLKGFAYWGQGTLVTVSA (SEQ | NO: 229) |
| | ID NO: 228) | |
| I23RB71 | DVQLQESGPDLVKPSQSLSLTCTVT | DIVMTQSHKFMSTSVGDRVSITCKASQD |
| | DYSITRGYNWHWIRQFPGNKLEWM | VITAVAWYQQKPGQSPKLLIYSASYRYT |
| | GYIHYSGSTNYNPSLKSRISITRDTS | GVPDRFTGSGSGTDFTFTISSVQAEDLAV |
| | KNQFFLQLNSVTTEDTATYYCARQ | YFCQQHFGTPYTFGSGTKLEMK (SEQ ID |
| | YGLKAMDYWGQGTSVTVSS (SEQ | NO: 231) |
| | ID NO: 230) | |
| I23RB73 | EVQLQQSGAELVKPGASVKISCKAS | DIVMTQSHKFMSTSVGDRVSITCKASQD |
| | GYTFTDHAIHWVKQRPEQGLEWIG | VSTAVAWYQQKPGQSPKLLIYWASTRLT |
| | YISLGNGDIKYSEKFRGKATLTADK | GVPDRFTGSGSGTDYTLTISSVQAEDLAL |
| | TSNTAYMQLNSLTSEDSAVYFCKRS | YYCQQYYNTPLTFGAGTKLELK (SEQ ID |
| | RVLRWTTYWYFDVWGAGTSVTVS | NO: 233) |
| | S (SEQ ID NO: 232) | |
| I23RB74 | DVQLQESGPGLVKPSQSLSLTCSVT | DIVLTQSPASLAVSLGQRATISCRASKSVS |
| | GYSITSGYYWNWIRQFPGNKLEWM | TSGSNFLHWYQQKPGQPPKLLIYFASNLE |
| | GYISYDGSFNYNPSLKNRLSITRDTS | SGVPARFSGSGSGTDFTLNIHPVEEEDAA |
| | MNQFFLKLNSVTSEDTATYYCARA | TYYCQHSRELPHTFGAGTKLELK (SEQ ID |
| | EIYYDYDGDFDYWGQGTTLTVSS | NO: 235) |
| | (SEQ ID NO: 234) | |
| I23RB76 | EVQLQQSGPELVKPGASVKMSCKA | DIVLTQSPATLCVTPGETVSLSCRASQNIY |
| | SGYTFTDYYMNWMKQSHGKSLEW | KNLHWFQQKSHRSPRLLIKYASDSISGIPS |
| | IGYISPKNGRTGYNQKFKGKATLTV | RFTGSGSGTDYTLSINSVKPEDEGIYYCLQ |
| | DKSSTTAYMELRSLTSEDSAVYYCA | GYSTPWTFGGGTKLEIK (SEQ ID NO: 237) |
| | KSNGYYALDYWGQGTTVTVSS | |
| | (SEQ ID NO: 236) | |
| I23RB77 | DVQLQESGPGLVAPSQSLSITCTVSG | DIVMTQSPASLALSLGQRATISCRASESV |
| | FSLSRYSVHWVRQPPGKGLEWLGM | DSYGNSFMHWYQQKPGQPPKLLIYLASN |
| | IWGSGSTDYNSALKSRLSINKDNSK | LESGVPARFSGSGSRTDFTLTIDPVEADD |
| | SQVFLKMNSLQTDDTAMYYCARV | AAIYYCQQNNEEPNTFGAGTKLEMK |
| | YYGGSPYAMDYWGQGTTVTVSS | (SEQ ID NO: 239) |
| | (SEQ ID NO: 238) | |
| I23RB78 | EFQLQQSGGGLVKPGGSLKLSCAAS | DIVMTQSPASLAVSLGQRATISCRASESV |
| | GFTFSNYTMSWVRQTPEKRLKWVA | DSYGISFMHWYQQKPGQPPKLLIYRASNL |
| | CISSGGGNTYYPDSVKGRFTISRDN | ESGIPARFSGSGSRTDFTLTINPVEADDVA |
| | ARNTLYLQMSSLRSEDTAMYYCAR | TYYCQQSNEDPWTFGAGTGLEIK (SEQ ID |
| | RNYRRAMDYWGQGTSVTVSS (SEQ | NO: 241) |
| | ID NO: 240) | |
| I23RB79 | DVQLQESGPELVRPGASVKMSCKA | DIQMTQSPKFLHVSAGDRVTITCKASQSV |
| | SGYTFTDYYMNWVKQSHGKSLEWI | INDVAWYQQKPGQSPKLLIYYASNRYTG |
| | GYIYPNNGDTVYNQKFKGKATLTV | VPDRFTGSGYGTDFTFTISTVQAEDLAIYF |
| | DKSSNTAYMELRSLTSEDSAVYYC | CQQDYSSPPTFGAGTRLEIK (SEQ ID |
| | ARGTLTGMYYFDYWGQGTSVTVSS | NO: 243) |
| | (SEQ ID NO: 242) | |
| I23RB80 | DVQLQESGPGLVQPSQSLSITCTVSG | DIVMTQSQKFMSTSEGDRVNITCKASQNI |
| | FSLTSYGVHWVRQSPGKGLEWLGV | RTAVAWYQQKPGQSPKPLIYLASNRHTG |
| | IWSGVSTDYNAAFISRLSISKDNSKS | VPDRFTGSGSGTDFTLTISNVQSEDLAEYF |
| | QVFFKMNSLQADDTAIYYCARSRG | CLQHWNYPLTFGAGTKLELK (SEQ ID |
| | SYYFDYWGQGTTLTVSS (SEQ ID | NO: 245) |
| | NO: 244) | |
| I23RB81 | DVQLQESGPGLVAPSQSLSITCTVSG | DIVMTQSHKFMSTSVGDRVSIICKASQDV |
| | FSLTSYAINWVRQPPGKGLEWLGVI | STAVAWYQQKPGQSPKLLIYSASYRYTG |
| | WTGGGTNYNSALKSRLSISKDNSKS | VPDRFTGSGSGTDFTFTISSVQAEDLAVY |
| | QLFLKMNSLQTDDTARYYCARNRD | YCQQHYSTPLTFGAGTRLEIK (SEQ ID |
| | YSNYRWYFDVWGAGTSVTVSS | NO: 247) |
| | (SEQ ID NO: 246) | |
| I23RB82 | QVQLKESGPGLVAPSQSLSITCTVSG | QIVLSQSHKFMSTSVGDRVSITCKASQDV |
| | FSLTNYALHWFRQSPGKGLEWLGVI | STAVAWYQQKPGQSPKLLIYSAFYRYTG |
| | WSDGSTDYNSPFISRLSISKDNSKSQ | VPDRFTGSGSGTDFTFTISSVQAEDLAVY |
| | VFFKMNSLQADDTAIYYCARSRSN | YCQQHYSTPYTFGGGTKLEIK (SEQ ID |
| | YGRWYFDVWGAGTTLTVSS (SEQ | NO: 249) |
| | ID NO: 248) | |
| I23RB83 | DVQLQESGPGLVAPSQSLSITCTVSG | DIQMTQSPASQSASLGESVTITCLASQTIG |
| | FSLTNYDVHWVRQSPGKGLEWLGV | SWLAWYQQKPGKSPQLLIYAATSLADGV |
| | IWSDGSTDYNAAFISRLSFSKDNSKR | PSRFSGSGSGTKFSFKISSLQAEDFVSYYC |
| | QVFFKMNSLQPDDTAIYYCARNNY | QQLYSSPLTFGGGTKLEIK (SEQ ID |
| | YRYGRNPMDYWGQGTTVTVSS | NO: 251) |
| | (SEQ ID NO: 250) | |
| I23RB85 | DVQLQESGPGLVAPSQSLSITCTVSG | DIVLTQSPLSLFVSLGDQASISCRSSQSLV |
| | FSFNTYAITWVRQPPGRGLEWLGVL | HSNGNTYLHWYLQKPGQSPKLLIYKVSN |
| | WPGGGISYNLALKSRLTISRDSSKSQ | RFSGVPDRFSGSGSGTDFTLKISRVEAEDL |
| | VFLEMNSLQTDDTARYYCARNWR | GVYFCSQSTHVPWTFGGGTRLEIK (SEQ |
| | HYDGSYAMDFWGQGTSVTVSS | ID NO: 253) |
| | (SEQ ID NO: 252) | |
| I23RB86 | EVQLQQSGAELVKPGASVKLSCKA | DIVMTQSPSSMSVSLGDTVSITCHASQGIS |
| | SGYTFTSYWLHWVKQRPGQGLEWI | SNIGWLQQKPGKSFKGLIYHGTNLEDEVP |
| | GEIDPSDSYTYYNQKFKGKATLTVD | SRFSGSGSGADYSLTIGSLESEDFADYYC |
| | KSSSTAYMQLSSLTSEDSAVYYCAR | VQYAQFPWTFGAGTKLEMK (SEQ ID |
| | SPYDYDWGAYWGQGTSVTVSS | NO: 255) |
| | (SEQ ID NO: 254) | |
| I23RB87 | EFQLQQSGPELVKPGTSVKMSCKAS | DIVMTQTTSSLSASLGDRVTISCRASQDIS |
| | GYTFTNYVMHWVKQKPGQGLEWI | NYLNWYQQKPDGTVKLLIYYTSRLHSGV |
| | GYINPYDASPKYNEKFKGKAILTSD | PSRFSGSGSGTDFSLTISNLEQEDIATYFC |
| | KSSSTAYMELSSLTSEDSAVYYCTR | QQGITLPWTFGAGTKLELK (SEQ ID |
| | DAKLDYFDYWGQGTTLTVSS (SEQ | NO: 257) |
| | ID NO: 256) | |
| I23RB91 | EFQLQQFGPELLKPGASVKISCKAS | DIKMTQSPSSMYASLGERVTITCKASQDI |
| | GYTFTDYIMHWVKQSHGKSLEWIG | NSYLSWCQQKPGKSPKALIYRANSLVDG |
| | GISPNYGGTGYNGKFKDKATLTVD | VPSRFSGSGSGQDYSLTISSLEYEDMGIYY |
| | KSSSTAYMELRSLTSEDSAVYYCAR | CLQYDEFPYTFGGGTKLEMK (SEQ ID |
| | FNNYYYFDYWGQGTTLTVSS (SEQ | NO: 259) |
| | ID NO: 258) | |
| I23RB92 | EVQLQQSGPEVVKPGASVKISCKAS | DIKMTQSPASLAVSLGQRATISCRASQSV |
| | GYTFTDHTMDWVKQSHGKNLEWI | STSKYDYIHWYQQKSGQPPRLLIKYASNL |
| | GYIYPKSGGTGYNQKFKNKATLTV | ESGVPARFSGSGSGTDFTLNIHPVEEEDTA |
| | DKSSSTAYMEFHSLTSDDSAVYYCA | TYYCQHTWEIPYTFGSGTKLELK (SEQ ID |
| | RWGLRRDGFVYWGQGTLVTVSA | NO: 261) |
| | (SEQ ID NO: 260) | |
| I23RB93 | QVQLKESGPGLVQPSQSLSITCTVSG | DIKMTQSPATLSVTPGDSVSLFCRASQSIS |
| | FSLTSYGVHWVRQSPGKGLEWLGV | NNLHWYQQKSHESPRLLIKYASQSISGIPS |
| | IWSGVSTDYNAAFISRLSISKDNSKS | RFSGSGSGTDFTLSINSVETEDFGMYFCQ |
| | QVFFKMNSLQADDTAIYYCARSRG | QSNSWPLTFGGGTKLEIK (SEQ ID |
| | SYYFDYWGQGTTLTVSS (SEQ ID | NO: 263) |
| | NO: 262) | |
| I23RB94 | DVQLQESGPELKKPGETVKISCKAS | DIVMTQSHKFMSTSVGDRVSITCKASQD |
| | GYTFTNYGMNWVRQAPGKSLKWM | VNTAVAWYQQKPGQSPKLLIYSAFYRYP |
| | GWINTNTGEPAYAEEFKGRFAFSLE | GVPDRFTGSGSGTDFTFTINSVQAEDLAV |
| | TSASTAYLQINNLKNEDMATYFCAR | YCCQQHYTSPLTFGDGTRLEIK (SEQ ID |
| | VRQTARATRGYFDVWGTGTTVTVS | NO: 265) |
| | S (SEQ ID NO: 264) | |
| I23RB95 | EVKLVESGGGLVQPGSSMKLSCTAS | DIVLTQSHKFMSTSVGDRVSITCKASQDV |
| | GFTFSDYYMAWVRQVPEKGLEWV | GTAVAWYQQKPGQSPKLLIYWASTRHTG |
| | ANINYDGSNTYYLDSLKSRFIISRDN | VPDRFTGSGSGTDFTLTISNVQSEDLADY |
| | AKNILYLQMSSLKSEDTATYYCARE | FCQQYSTYPYTVGGGTKLEIK (SEQ ID |
| | GYDEAMDYWGQGTTLTVSS (SEQ | NO: 267) |
| | ID NO: 266) | |
| I23RB98 | EFQLQQSGPELVKPGASVKMSCKAS | DIVLTQSPAIMSASLGERVTMTCTASSSVS |
| | GYTFTNYYMHWVKQSHGKTIEWIG | SSYLHWYQQKPGSSPKLWIYSTSNLASG |
| | YIYPNSGDTSYNQKFKGKATLTVDK | VPARFSGSGSGTSYSLTISSMEAEDAATY |
| | SSSTAYMELRSLTSEDSAVYTCARF | YCHQYHRSPFTFGSGTKLEMK (SEQ ID |
| | GGFYDAMDYWGQGTTVTVSS (SEQ | NO: 269) |
| | ID NO: 268) | |

TABLE 6
CDR AA Sequences of Exemplary Immunization Based IL-23R Antibodies

| Name | HCDR1 | HCDR2 | HCDR3 | LCDR1 | LCDR2 | LCDR3 |
|---|---|---|---|---|---|---|
| I23RB101 | GGTFSSYA | INPNSGGT | ARGYRYG | QDVRTA | SAS (SEQ | QQHYSTP |
| | (SEQ ID | (SEQ ID | PLDGFDI | (SEQ ID | ID NO: 274) | YT (SEQ ID |
| | NO: 270) | NO: 271) | (SEQ ID | NO: 273) | | NO: 275) |
| | | | NO: 272) | | | |
| I23RB102 | GYTFTKY | IYPGSIST | ARGDFYA | ENIYSH | AST (SEQ | QHFWGTP |
| | W (SEQ ID | (SEQ ID | LDY (SEQ | (SEQ ID | ID NO: 280) | WT (SEQ |
| | NO: 276) | NO: 277) | ID NO: 278) | NO: 279) | | ID NO: 281) |
| I23RB104 | GFTFSSYA | ISTGGST | ARGPHYY | ENIYSN | AAT (SEQ | QHFWGTP |
| | (SEQ ID | (SEQ ID | GGSYPFAY | (SEQ ID | ID NO: 286) | PT (SEQ ID |
| | NO: 282) | NO: 283) | (SEQ ID | NO: 285) | | NO: 287) |
| | | | NO: 284) | | | |
| I23RB144 | GYTFTSYI | IDPYNDDT | ARLGSINY | QSLLDSDG | LVS (SEQ | WQGIHFPL |
| | (SEQ ID | (SEQ ID | YDGSYFD | KTY (SEQ | ID NO: 292) | T (SEQ ID |
| | NO: 288) | NO: 289) | Y (SEQ ID | ID NO: 291) | | NO: 293) |
| | | | NO: 290) | | | |
| I23RB148 | GYSITSGY | IHSSGTT | TRQLGLK | QEVRTA | SAS (SEQ | QQHYTTP |
| | N (SEQ ID | (SEQ ID | AMEY | (SEQ ID | ID NO: 298) | YS (SEQ ID |
| | NO: 294) | NO: 295) | (SEQ ID | NO: 297) | | NO: 299) |
| | | | NO: 296) | | | |
| I23RB149 | GYSITSGY | IHFSDRT | SRQLGLK | QSLVHSN | KVS (SEQ | SQSTHVPL |
| | N (SEQ ID | (SEQ ID | ALDY (SEQ | GNTY (SEQ | ID NO: 304) | T (SEQ ID |
| | NO: 300) | NO: 301) | ID NO: 302) | ID NO: 303) | | NO: 305) |
| I23RB150 | AYTFTNY | IKTNTGEP | ARSRQLGL | QDVSTA | SAS (SEQ | QQHYSTP |
| | G (SEQ ID | (SEQ ID | RYYFDY | (SEQ ID | ID NO: 310) | YT (SEQ ID |
| | NO: 306) | NO: 307) | (SEQ ID | NO: 309) | | NO: 311) |
| | | | NO: 308) | | | |
| I23RB153 | GFTFSSDT | ISSNGGST | ASPGYPW | QDVGNA | WTS (SEQ | QQYNRYP |
| | (SEQ ID | (SEQ ID | FAY (SEQ | (SEQ ID | ID NO: 316) | LT (SEQ ID |
| | NO: 312) | NO: 313) | ID NO: 314) | NO: 315) | | NO: 317) |
| I23RB155 | GYSITSGH | ISYDGTN | ARGGGYY | ESVDTYG | RAS (SEQ | QQGNKDP |
| | S (SEQ ID | (SEQ ID | GGTYRVF | NSF (SEQ | ID NO: 322) | YT (SEQ ID |
| | NO: 318) | NO: 319) | AD (SEQ ID | ID NO: 321) | | NO: 323) |
| | | | NO: 320) | | | |
| I23RB156 | GFSLTSYA | IWTGGGT | ARNRDYS | QDVSTA | SAF (SEQ | QQHYSIPL |
| | (SEQ ID | (SEQ ID | NYRWYFD | (SEQ ID | ID NO: 328) | T (SEQ ID |
| | NO: 324) | NO: 325) | V (SEQ ID | NO: 327) | | NO: 329) |
| | | | NO: 326) | | | |
| I23RB157 | GFTFSRYT | ISTGGGDT | ARRTSYSY | ESVDNYGI | AAS (SEQ | QQSKEVP |
| | (SEQ ID | (SEQ ID | YNYVFDY | SF (SEQ ID | ID NO: 334) | WT (SEQ |
| | NO: 330) | NO: 331) | (SEQ ID | NO: 333) | | ID NO: 335) |
| | | | NO: 332) | | | |
| I23RB159 | GFTFSDYG | ISNLAYSV | ARHGDYR | QDISNY | YTS (SEQ | QQGNTLP |
| | (SEQ ID | (SEQ ID | NYGFAY | (SEQ ID | ID NO: 340) | WT (SEQ |
| | NO: 336) | NO: 337) | (SEQ ID | NO: 339) | | ID NO: 341) |
| | | | NO: 338) | | | |
| I23RB160 | GYSITSGY | IHYSSGT | ARQLGLK | QDVRTA | SAS (SEQ | QQHYTTP |
| | N (SEQ ID | (SEQ ID | AMDY | (SEQ ID | ID NO: 346) | YT (SEQ ID |
| | NO: 342) | NO: 343) | (SEQ ID | NO: 345) | | NO: 347) |
| | | | NO: 344) | | | |
| I23RB161 | VYAFSSS | IYPGDGDT | ARRYDFG | SSVSY | ATS (SEQ | QQWSSNP |
| | W (SEQ ID | (SEQ ID | SAMDY | (SEQ ID | ID NO: 352) | PT (SEQ ID |
| | NO: 348) | NO: 349) | (SEQ ID | NO: 351) | | NO: 353) |
| | | | NO: 350) | | | |
| I23RB162 | GYTFTNY | INPYNDGT | ARSRTGTR | QNVGTN | SAS (SEQ | QQYNSYPF |
| | V (SEQ ID | (SEQ ID | WYFDV | (SEQ ID | ID NO: 358) | T (SEQ ID |
| | NO: 354) | NO: 355) | (SEQ ID | NO: 357) | | NO: 359) |
| | | | NO: 356) | | | |
| I23RB165 | GFNIKDSL | IDPEDGKT | ARREVLD | KSVSTSGY | LAS (SEQ | QHSRELPL |
| | (SEQ ID | (SEQ ID | YFDY (SEQ | SY (SEQ ID | ID NO: 364) | T (SEQ ID |
| | NO: 360) | NO: 361) | ID NO: 362) | NO: 363) | | NO: 365) |
| I23RB166 | GYSITNGN | IRSSGST | ARERLRLR | QDVSTA | SAS (SEQ | QQHYSTPR |
| | HW (SEQ | (SEQ ID | WSYFDY | (SEQ ID | ID NO: 370) | T (SEQ ID |
| | ID NO: 366) | NO: 367) | (SEQ ID | NO: 369) | | NO: 371) |
| | | | NO: 368) | | | |
| I23RB168 | GYTFTDY | IYPAINNT | AISRKPYF | EDLYNR | GAT (SEQ | QQYWSIP |
| | Y (SEQ ID | (SEQ ID | DY (SEQ ID | (SEQ ID | ID NO: 376) | WT (SEQ |
| | NO: 372) | NO: 373) | NO: 374) | NO: 375) | | ID NO: 377) |
| I23RB169 | GYTFTTVG | INTHSGEP | ARSSALTG | KSVSTSDY | LAS (SEQ | QHSRELPR |
| | (SEQ ID | (SEQ ID | AFAY (SEQ | SY (SEQ ID | ID NO: 382) | T (SEQ ID |
| | NO: 378) | NO: 379) | ID NO: 380) | NO: 381) | | NO: 383) |
| I23RB173 | GYSITSGY | ISYDGGN | ARDAGLL | SSVSY | STS (SEQ | QQRSSYPL |
| | Y (SEQ ID | (SEQ ID | PYYAMDY | (SEQ ID | ID NO: 388) | T (SEQ ID |
| | NO: 384) | NO: 385) | (SEQ ID | NO: 387) | | NO: 389) |
| | | | NO: 386) | | | |
| I23RB177 | GYTITDYT | INPNYGGT | VRGNIYFD | QDINSY | RAN (SEQ | QQYDEFPR |
| | (SEQ ID | (SEQ ID | Y (SEQ ID | (SEQ ID | ID NO: 394) | T (SEQ ID |
| | NO: 390) | NO: 391) | NO: 392) | NO: 393) | | NO: 395) |
| I23RB180 | GFSLSTYG | IWWNDSK | GRIDGYYE | VNIHNY | NAK (SEQ | QHFWTTP |
| | MG (SEQ | (SEQ ID | CVDV | (SEQ ID | ID NO: 400) | YMYT |
| | ID NO: 396) | NO: 397) | (SEQ ID | NO: 399) | | (SEQ ID |
| | | | NO: 398) | | | NO: 401) |
| I23RB182 | GYSITSGY | IDNDGSN | ARGRLGFF | SSVNY | YTS (SEQ | QQFTNSP |
| | F (SEQ ID | (SEQ ID | DS (SEQ ID | (SEQ ID | ID NO: 406) | WT (SEQ |
| | NO: 402) | NO: 403) | NO: 404) | NO: 405) | | ID NO: 407) |
| I23RB188 | GYTFTNY | INTYTGAP | ARGNGYP | QEISGN | AAS (SEQ | LQYASYP |
| | G (SEQ ID | (SEQ ID | YYYGINY | (SEQ ID | ID NO: 412) | WT (SEQ |
| | NO: 408) | NO: 409) | (SEQ ID | NO: 411) | | ID NO: 413) |
| | | | NO: 410) | | | |
| I23RB189 | GYSITSGY | IHSSGTT | TRQLGLK | ENVGTY | GAS (SEQ | GQSYSYPP |
| | N (SEQ ID | (SEQ ID | AMEY | (SEQ ID | ID NO: 418) | T (SEQ ID |
| | NO: 414) | NO: 415) | (SEQ ID | NO: 417) | | NO: 419) |
| | | | NO: 416) | | | |
| I23RB27 | GFSLTSYG | LGWDDKK | TKEDVSY | ESVEYYGT | AAS (SEQ | QQGKKVP |
| | (SEQ ID | (SEQ ID | AMDF | SL (SEQ ID | ID NO: 424) | WT (SEQ |
| | NO: 420) | NO: 421) | (SEQ ID | NO: 423) | | ID NO: 425) |
| | | | NO: 422) | | | |
| I23RB30 | GFSLSTSG | IYWDDDK | ARRTLGGP | QNIRTA | LPS (SEQ | LQHWNYP |
| | MG (SEQ | (SEQ ID | PFDY (SEQ | (SEQ ID | ID NO: 430) | LT (SEQ ID |
| | ID NO: 426) | NO: 427) | ID NO: 428) | NO: 429) | | NO: 431) |
| I23RB31 | GYTFTGY | IDPSDTET | ARWGLGR | QSISDH | FAS (SEQ | QNGHSFPL |
| | W (SEQ ID | (SEQ ID | NFAMDY | (SEQ ID | ID NO: 436) | T (SEQ ID |
| | NO: 432) | NO: 433) | (SEQ ID | NO: 435) | | NO: 437) |
| | | | NO: 434) | | | |
| I23RB32 | GYTFTDY | IYPGGGNT | ARGRLRR | QSLLNSGN | WAS (SEQ | QNDYTYP |
| | A (SEQ ID | (SEQ ID | DYPMDY | QKNY | ID NO: 442) | LT (SEQ ID |
| | NO: 438) | NO: 439) | (SEQ ID | (SEQ ID | | NO: 443) |
| | | | NO: 440) | NO: 441) | | |
| I23RB33 | GFNIRDIY | IDPANGHS | ARGSDND | SSVRSSY | STS (SEQ | QQYTGNPI |
| | (SEQ ID | (SEQ ID | YGRVLAY | (SEQ ID | ID NO: 448) | FT (SEQ ID |
| | NO: 444) | NO: 445) | (SEQ ID | NO: 447) | | NO: 449) |
| | | | NO: 446) | | | |
| I23RB35 | GYSITSGH | ISYDGSN | ARGGGYF | ESVDSYG | RAS (SEQ | QQSNADP |
| | N (SEQ ID | (SEQ ID | GNSYRVF | NSF (SEQ | ID NO: 454) | YT (SEQ ID |
| | NO: 450) | NO: 451) | AS (SEQ ID | ID NO: 453) | | NO: 455) |
| | | | NO: 452) | | | |
| I23RB36 | GFNIKDTY | IDPANGNT | TRGTSWF | ENVGTS | GAS (SEQ | GQSYSYPR |
| | (SEQ ID | (SEQ ID | AY (SEQ ID | (SEQ ID | ID NO: 460) | T (SEQ ID |
| | NO: 456) | NO: 457) | NO: 458) | NO: 459) | | NO: 461) |
| I23RB39 | GYTFTNY | IYPGNGGT | ARSRGGSR | QDVSTA | SAF (SEQ | QQHYSSPR |
| | Y (SEQ ID | (SEQ ID | NYFDY | (SEQ ID | ID NO: 466) | T (SEQ ID |
| | NO: 462) | NO: 463) | (SEQ ID | NO: 465) | | NO: 467) |
| | | | NO: 464) | | | |
| I23RB42 | GYSFTDYI | INPYFGFT | SRGSYYG | KSLLHSNG | RMS (SEQ | MQHLEYP |
| | (SEQ ID | (SEQ ID | YETFFDY | NTY (SEQ | ID NO: 472) | YT (SEQ ID |
| | NO: 468) | NO: 469) | (SEQ ID | ID NO: 471) | | NO: 473) |
| | | | NO: 470) | | | |
| I23RB45 | GFSLSTYG | IYWDDDK | AQRALPLL | QNVRTA | LPS (SEQ | LQHWNYP |
| | MG (SEQ | (SEQ ID | GQKAPFD | (SEQ ID | ID NO: 478) | LT (SEQ ID |
| | ID NO: 474) | NO: 475) | Y (SEQ ID | NO: 477) | | NO: 479) |
| | | | NO: 476) | | | |
| I23RB47 | GFSLTNYD | IWSDGRT | ARNNYYR | QTIGSW | AAT (SEQ | HQLYSIPL |
| | (SEQ ID | (SEQ ID | YGRNTMD | (SEQ ID | ID NO: 484) | T (SEQ ID |
| | NO: 480) | NO: 481) | Y (SEQ ID | NO: 483) | | NO: 485) |
| | | | NO: 482) | | | |
| I23RB51 | GYSITSGY | VHYRDST | ARQLGLK | GNIHNY | NAK (SEQ | QYFWTTR |
| | N (SEQ ID | (SEQ ID | AMDY | (SEQ ID | ID NO: 490) | T (SEQ ID |
| | NO: 486) | NO: 487) | (SEQ ID | NO: 489) | | NO: 491) |
| | | | NO: 488) | | | |
| I23RB54 | GFTFSSYA | ISSGGSYI | ARKKSDY | QSVSND | YAS (SEQ | QQDYSSLP |
| | (SEQ ID | (SEQ ID | GAMDY | (SEQ ID | ID NO: 496) | T (SEQ ID |
| | NO: 492) | NO: 493) | (SEQ ID | NO: 495) | | NO: 497) |
| | | | NO: 494) | | | |
| I23RB56 | GFTFSSYA | INSNDGST | ARHFLYFS | QSVSND | YAS (SEQ | QQDYSSPF |
| | (SEQ ID | (SEQ ID | NFYYFDY | (SEQ ID | ID NO: 502) | T (SEQ ID |
| | NO: 498) | NO: 499) | (SEQ ID | NO: 501) | | NO: 503) |
| | | | NO: 500) | | | |
| I23RB57 | GYTFTNY | IYPNSGDT | ARFGGFY | SSVSSSY | STS (SEQ | HQYHRSPF |
| | Y (SEQ ID | (SEQ ID | DAMDY | (SEQ ID | ID NO: 508) | T (SEQ ID |
| | NO: 504) | NO: 505) | (SEQ ID | NO: 507) | | NO: 509) |
| | | | NO: 506) | | | |
| I23RB58 | GFSFIIYT | ITSGGGIT | ARHEGDY | ESVDSYG | RAS (SEQ | QQSNEDPL |
| | (SEQ ID | (SEQ ID | YDDYYRI | NSF (SEQ | ID NO: 514) | T (SEQ ID |
| | NO: 510) | NO: 511) | GYAMDY | ID NO: 513) | | NO: 515) |
| | | | (SEQ ID | | | |
| | | | NO: 512) | | | |
| I23RB60 | GYTFTDY | IYPNNGGI | AREKLRG | QDIRNN | YSS (SEQ | QQGHTLP |
| | Y (SEQ ID | (SEQ ID | RDY (SEQ | (SEQ ID | ID NO: 520) | WT (SEQ |
| | NO: 516) | NO: 517) | ID NO: 518) | NO: 519) | | ID NO: 521) |
| I23RB61 | DYTFTSFD | IFPGSGTT | ARRLTGTR | QDVITA | WAS (SEQ | QQHYTTPP |
| | (SEQ ID | (SEQ ID | YFDV (SEQ | (SEQ ID | ID NO: 526) | T (SEQ ID |
| | NO: 522) | NO: 523) | ID NO: 524) | NO: 525) | | NO: 527) |
| I23RB65 | GYTFTDHT | IYPKSGNA | ARWGLRR | QSVSTSSY | YAS (SEQ | QHTWEIPY |
| | (SEQ ID | (SEQ ID | DGFTY | NY (SEQ ID | ID NO: 532) | T (SEQ ID |
| | NO: 528) | NO: 529) | (SEQ ID | NO: 531) | | NO: 533) |
| | | | NO: 530) | | | |
| I23RB66 | GFSLSTSN | IWWNSDK | AQIRWLRF | QDVSTA | SAS (SEQ | QQHYSTP |
| | MG (SEQ | (SEQ ID | YFDY (SEQ | (SEQ ID | ID NO: 538) | YT (SEQ ID |
| | ID NO: 534) | NO: 535) | ID NO: 536) | NO: 537) | | NO: 539) |
| I23RB67 | GYTFTSY | IYPGSSST | ARSAYGN | QDVSTA | SAF (SEQ | QQHYSTP |
| | W (SEQ ID | (SEQ ID | RLAMDY | (SEQ ID | ID NO: 544) | YT (SEQ ID |
| | NO: 540) | NO: 541) | (SEQ ID | NO: 543) | | NO: 545) |
| | | | NO: 542) | | | |
| I23RB69 | GYSFTGY | INPFYDKT | ARQLGLK | QDVSTA | SAS (SEQ | QQHYSTP |
| | N (SEQ ID | (SEQ ID | GFAY (SEQ | (SEQ ID | ID NO: 550) | WT (SEQ |
| | NO: 546) | NO: 547) | ID NO: 548) | NO: 549) | | ID NO: 551) |
| I23RB71 | DYSITRGY | IHYSGST | ARQYGLK | QDVITA | SAS (SEQ | QQHFGTP |
| | N (SEQ ID | (SEQ ID | AMDY | (SEQ ID | ID NO: 556) | YT (SEQ ID |
| | NO: 552) | NO: 553) | (SEQ ID | NO: 555) | | NO: 557) |
| | | | NO: 554) | | | |
| I23RB73 | GYTFTDH | ISLGNGDI | KRSRVLR | QDVSTA | WAS (SEQ | QQYYNTP |
| | A (SEQ ID | (SEQ ID | WTTYWYF | (SEQ ID | ID NO: 562) | LT (SEQ ID |
| | NO: 558) | NO: 559) | DV (SEQ ID | NO: 561) | | NO: 563) |
| | | | NO: 560) | | | |
| I23RB74 | GYSITSGY | ISYDGSF | ARAEIYYD | KSVSTSGS | FAS (SEQ | QHSRELPH |
| | Y (SEQ ID | (SEQ ID | YDGDFDY | NF (SEQ ID | ID NO: 568) | T (SEQ ID |
| | NO: 564) | NO: 565) | (SEQ ID | NO: 567) | | NO: 569) |
| | | | NO: 566) | | | |
| I23RB76 | GYTFTDY | ISPKNGRT | AKSNGYY | QNIYKN | YAS (SEQ | LOGYSTP |
| | Y (SEQ ID | (SEQ ID | ALDY (SEQ | (SEQ ID | ID NO: 574) | WT (SEQ |
| | NO: 570) | NO: 571) | ID NO: 572) | NO: 573) | | ID NO: 575) |
| I23RB77 | GFSLSRYS | IWGSGST | ARVYYGG | ESVDSYG | LAS (SEQ | QQNNEEP |
| | (SEQ ID | (SEQ ID | SPYAMDY | NSF (SEQ | ID NO: 580) | NT (SEQ ID |
| | NO: 576) | NO: 577) | (SEQ ID | ID NO: 579) | | NO: 581) |
| | | | NO: 578) | | | |
| I23RB78 | GFTFSNYT | ISSGGGNT | ARRNYRR | ESVDSYGI | RAS (SEQ | QQSNEDP |
| | (SEQ ID | (SEQ ID | AMDY | SF (SEQ ID | ID NO: 586) | WT (SEQ |
| | NO: 582) | NO: 583) | (SEQ ID | NO: 585) | | ID NO: 587) |
| | | | NO: 584) | | | |
| I23RB79 | GYTFTDY | IYPNNGDT | ARGTLTG | QSVIND | YAS (SEQ | QQDYSSPP |
| | Y (SEQ ID | (SEQ ID | MYYFDY | (SEQ ID | ID NO: 592) | T (SEQ ID |
| | NO: 588) | NO: 589) | (SEQ ID | NO: 591) | | NO: 593) |
| | | | NO: 590) | | | |
| I23RB80 | GFSLTSYG | IWSGVST | ARSRGSY | QNIRTA | LAS (SEQ | LQHWNYP |
| | (SEQ ID | (SEQ ID | YFDY (SEQ | (SEQ ID | ID NO: 598) | LT (SEQ ID |
| | NO: 594) | NO: 595) | ID NO: 596) | NO: 597) | | NO: 599) |
| I23RB81 | GFSLTSYA | IWTGGGT | ARNRDYS | QDVSTA | SAS (SEQ | QQHYSTPL |
| | (SEQ ID | (SEQ ID | NYRWYFD | (SEQ ID | ID NO: 604) | T (SEQ ID |
| | NO: 600) | NO: 601) | V (SEQ ID | NO: 603) | | NO: 605) |
| | | | NO: 602) | | | |
| I23RB82 | GFSLTNYA | IWSDGST | ARSRSNY | QDVSTA | SAF (SEQ | QQHYSTP |
| | (SEQ ID | (SEQ ID | GRWYFDV | (SEQ ID | ID NO: 610) | YT (SEQ ID |
| | NO: 606) | NO: 607) | (SEQ ID | NO: 609) | | NO: 611) |
| | | | NO: 608) | | | |
| I23RB83 | GFSLTNYD | IWSDGST | ARNNYYR | QTIGSW | AAT (SEQ | QQLYSSPL |
| | (SEQ ID | (SEQ ID | YGRNPMD | (SEQ ID | ID NO: 616) | T (SEQ ID |
| | NO: 612) | NO: 613) | Y (SEQ ID | NO: 615) | | NO: 617) |
| | | | NO: 614) | | | |
| I23RB85 | GFSFNTYA | LWPGGGI | ARNWRHY | QSLVHSN | KVS (SEQ | SQSTHVP |
| | (SEQ ID | (SEQ ID | DGSYAMD | GNTY (SEQ | ID NO: 622) | WT (SEQ |
| | NO: 618) | NO: 619) | F (SEQ ID | ID NO: 621) | | ID NO: 623) |
| | | | NO: 620) | | | |
| I23RB86 | GYTFTSY | IDPSDSYT | ARSPYDY | QGISSN | HGT (SEQ | VQYAQFP |
| | W (SEQ ID | (SEQ ID | DWGAY | (SEQ ID | ID NO: 628) | WT (SEQ |
| | NO: 624) | NO: 625) | (SEQ ID | NO: 627) | | ID NO: 629) |
| | | | NO: 626) | | | |
| I23RB87 | GYTFTNY | INPYDASP | TRDAKLD | QDISNY | YTS (SEQ | QQGITLPW |
| | V (SEQ ID | (SEQ ID | YFDY (SEQ | (SEQ ID | ID NO: 634) | T (SEQ ID |
| | NO: 630) | NO: 631) | ID NO: 632) | NO: 633) | | NO: 635) |
| I23RB91 | GYTFTDYI | ISPNYGGT | ARFNNYY | QDINSY | RAN (SEQ | LQYDEFPY |
| | (SEQ ID | (SEQ ID | YFDY (SEQ | (SEQ ID | ID NO: 640) | T (SEQ ID |
| | NO: 636) | NO: 637) | ID NO: 638) | NO: 639) | | NO: 641) |
| I23RB92 | GYTFTDHT | IYPKSGGT | ARWGLRR | QSVSTSKY | YAS (SEQ | QHTWEIPY |
| | (SEQ ID | (SEQ ID | DGFVY | DY (SEQ ID | ID NO: 646) | T (SEQ ID |
| | NO: 642) | NO: 643) | (SEQ ID | NO: 645) | | NO: 647) |
| | | | NO: 644) | | | |
| I23RB93 | GFSLTSYG | IWSGVST | ARSRGSY | QSISNN | YAS (SEQ | QQSNSWP |
| | (SEQ ID | (SEQ ID | YFDY (SEQ | (SEQ ID | ID NO: 652) | LT (SEQ ID |
| | NO: 648) | NO: 649) | ID NO: 650) | NO: 651) | | NO: 653) |
| I23RB94 | GYTFTNY | INTNTGEP | ARVRQTA | QDVNTA | SAF (SEQ | QQHYTSPL |
| | G (SEQ ID | (SEQ ID | RATRGYF | (SEQ ID | ID NO: 658) | T (SEQ ID |
| | NO: 654) | NO: 655) | DV (SEQ ID | NO: 657) | | NO: 659) |
| | | | NO: 656) | | | |
| I23RB95 | GFTFSDYY | INYDGSNT | AREGYDE | QDVGTA | WAS (SEQ | QQYSTYP |
| | (SEQ ID | (SEQ ID | AMDY | (SEQ ID | ID NO: 664) | YT (SEQ ID |
| | NO: 660) | NO: 661) | (SEQ ID | NO: 663) | | NO: 665) |
| | | | NO: 662) | | | |
| I23RB98 | GYTFTNY | IYPNSGDT | ARFGGFY | SSVSSSY | STS (SEQ | HQYHRSPF |
| | Y (SEQ ID | (SEQ ID | DAMDY | (SEQ ID | ID NO: 670) | T (SEQ ID |
| | NO: 666) | NO: 667) | (SEQ ID | NO: 669) | | NO: 671) |
| | | | NO: 668) | | | |

[1718] Examples of phage display based IL-23R antibodies or antigen binding fragments of the present disclosure are summarized in Table 7, Table 8, and Table 9. All of the phage display based antibodies with the exception of 123RB332 and 123RB7 were derived from the human phage display and are human antibodies. Antibody 123RB332, corresponding to VH SEQ ID NO: 898 and VL SEQ ID NO:899 and also antibody 123RB7, corresponding to VH SEQ ID NO:798 and VL SEQ ID NO:799, are mouse antibodies.

TABLE 7
HC and LC AA Sequences of Exemplary Phage Display Based IL-23R antibodies

| Names | HC Sequence | LC Sequence |
|---|---|---|
| I23RB1 | QVQLVQSGAEVKKPGSSVKVSCKASG | EIVLTQSPATLSLSPGERATLSCRASQS |
| | GTFKNYAISWVRQAPGQGLEWMGWI | VSSYLAWYQQKPGQAPRLLIYDASNR |
| | RPIFGTAYYAQKFQGRVTITADESTSTA | ATGIPARFSGSGSGTDFTLTISSLEPEDF |
| | YMELSSLRSEDTAVYYCARDSGSRYA | AVYYCQQRSNWPLTFGQGTKVEIKRA |
| | GRYAFDYWGQGTLVTVSSAKTTAPSV | DAAPTVSIFPPSSEQLTSGGASVVCFLN |
| | YPLAPVCGDTTGSSVTLGCLVKGYFPE | NFYPKDINVKWKIDGSERQNGVLNSW |
| | PVTLTWNSGSLSSGVHTFPAVLQSDLY | TDQDSKDSTYSMSSTLTLTKDEYERHN |
| | TLSSSVTVTSSTWPSQSITCNVAHPASS | SYTCEATHKTSTSPIVKSFNRNEC (SEQ |
| | TKVDKKIEPRGPTIKPCPPCKCPAPNLL | ID NO: 673) |
| | GGPSVFIFPPKIKDVLMISLSPIVTCVVV | |
| | DVSEDDPDVQISWFVNNVEVHTAQTQ | |
| | THREDYNSTLRVVSALPIQHQDWMSG | |
| | KEFKCKVNNKDLPAPIERTISKPKGSVR | |
| | APQVYVLPPPEEEMTKKQVTLTCMVT | |
| | DFMPEDIYVEWTNNGKTELNYKNTEP | |
| | VLDSDGSYFMYSKLRVEKKNWVERNS | |
| | YSCSVVHEGLHNHHTTKSFSRTPGK | |
| | (SEQ ID NO: 672) | |
| I23RB2 | QVQLVQSGAEVKKPGSSVKVSCKASG | EIVLTQSPATLSLSPGERATLSCRASQS |
| | GTFSSYAISWVRQAPGQGLEWMGGIIP | VSSYLAWYQQKPGQAPRLLIYDASNR |
| | IFGTANYAQKFQGRVTITADESTSTAY | ATGIPARFSGSGSGTDFTLTISSLEPEDF |
| | MELSSLRSEDTAVYYCARDRYRYLGA | AVYYCQQRSNWPLTFGQGTKVEIKRA |
| | NGFDYWGQGTLVTVSSAKTTAPSVYP | DAAPTVSIFPPSSEQLTSGGASVVCFLN |
| | LAPVCGDTTGSSVTLGCLVKGYFPEPV | NFYPKDINVKWKIDGSERQNGVLNSW |
| | TLTWNSGSLSSGVHTFPAVLQSDLYTL | TDQDSKDSTYSMSSTLTLTKDEYERHN |
| | SSSVTVTSSTWPSQSITCNVAHPASSTK | SYTCEATHKTSTSPIVKSFNRNEC (SEQ |
| | VDKKIEPRGPTIKPCPPCKCPAPNLLGG | ID NO: 675) |
| | PSVFIFPPKIKDVLMISLSPIVTCVVVDV | |
| | SEDDPDVQISWFVNNVEVHTAQTQTH | |
| | REDYNSTLRVVSALPIQHQDWMSGKE | |
| | FKCKVNNKDLPAPIERTISKPKGSVRAP | |
| | QVYVLPPPEEEMTKKQVTLTCMVTDF | |
| | MPEDIYVEWTNNGKTELNYKNTEPVL | |
| | DSDGSYFMYSKLRVEKKNWVERNSYS | |
| | CSVVHEGLHNHHTTKSFSRTPGK (SEQ | |
| | ID NO: 674) | |
| I23RB3 | QVQLVQSGAEVKKPGSSVKVSCKASG | EIVLTQSPATLSLSPGERATLSCRASQS |
| | GTFKSYSIHWVRQAPGQGLEWMGGIIP | VSSYLAWYQQKPGQAPRLLIYDASNR |
| | YFGYANYAQKFQGRVTITADESTSTAY | ATGIPARFSGSGSGTDFTLTISSLEPEDF |
| | MELSSLRSEDTAVYYCARERGYYGSIY | AVYYCQQRSNWPLTFGQGTKVEIKRA |
| | YGGGFDYWGQGTLVTVSSAKTTAPSV | DAAPTVSIFPPSSEQLTSGGASVVCFLN |
| | YPLAPVCGDTTGSSVTLGCLVKGYFPE | NFYPKDINVKWKIDGSERQNGVLNSW |
| | PVTLTWNSGSLSSGVHTFPAVLQSDLY | TDQDSKDSTYSMSSTLTLTKDEYERHN |
| | TLSSSVTVTSSTWPSQSITCNVAHPASS | SYTCEATHKTSTSPIVKSFNRNEC (SEQ |
| | TKVDKKIEPRGPTIKPCPPCKCPAPNLL | ID NO: 677) |
| | GGPSVFIFPPKIKDVLMISLSPIVTCVVV | |
| | DVSEDDPDVQISWFVNNVEVHTAQTQ | |
| | THREDYNSTLRVVSALPIQHQDWMSG | |
| | KEFKCKVNNKDLPAPIERTISKPKGSVR | |
| | APQVYVLPPPEEEMTKKQVTLTCMVT | |
| | DFMPEDIYVEWTNNGKTELNYKNTEP | |
| | VLDSDGSYFMYSKLRVEKKNWVERNS | |
| | YSCSVVHEGLHNHHTTKSFSRTPGK | |
| | (SEQ ID NO: 676) | |
| I23RB4 | QVQLVQSGAEVKKPGSSVKVSCKASG | EIVLTQSPATLSLSPGERATLSCRASQS |
| | GTFKTYAIHWVRQAPGQGLEWMGWII | VSSYLAWYQQKPGQAPRLLIYDASNR |
| | PIFGTANYAQKFQGRVTITADESTSTA | ATGIPARFSGSGSGTDFTLTISSLEPEDF |
| | YMELSSLRSEDTAVYYCARDGGYYGS | AVYYCQQRSNWPLTFGQGTKVEIKRA |
| | RYYPRSYYFDYWGQGTLVTVSSAKTT | DAAPTVSIFPPSSEQLTSGGASVVCFLN |
| | APSVYPLAPVCGDTTGSSVTLGCLVKG | NFYPKDINVKWKIDGSERQNGVLNSW |
| | YFPEPVTLTWNSGSLSSGVHTFPAVLQ | TDQDSKDSTYSMSSTLTLTKDEYERHN |
| | SDLYTLSSSVTVTSSTWPSQSITCNVAH | SYTCEATHKTSTSPIVKSFNRNEC (SEQ |
| | PASSTKVDKKIEPRGPTIKPCPPCKCPA | ID NO: 679) |
| | PNLLGGPSVFIFPPKIKDVLMISLSPIVT | |
| | CVVVDVSEDDPDVQISWFVNNVEVHT | |
| | AQTQTHREDYNSTLRVVSALPIQHQD | |
| | WMSGKEFKCKVNNKDLPAPIERTISKP | |
| | KGSVRAPQVYVLPPPEEEMTKKQVTL | |
| | TCMVTDFMPEDIYVEWTNNGKTELNY | |
| | KNTEPVLDSDGSYFMYSKLRVEKKNW | |
| | VERNSYSCSVVHEGLHNHHTTKSFSRT | |
| | PGK (SEQ ID NO: 678) | |
| I23RB5 | QVQLVQSGAEVKKPGSSVKVSCKASG | DIQMTQSPSSLSASVGDRVTITCRASQS |
| | GTFSSYAISWVRQAPGQGLEWMGGIIP | ISSYLNWYQQKPGKAPKLLIYAASSLQ |
| | IFGTANYAQKFQGRVTITADESTSTAY | SGVPSRFSGSGSGTDFTLTISSLQPEDF |
| | MELSSLRSEDTAVYYCARDSYYSTVT | ATYYCQQSYSTPLTFGQGTKVEIKRAD |
| | YYYFDYWGQGTLVTVSSAKTTAPSVY | AAPTVSIFPPSSEQLTSGGASVVCFLNN |
| | PLAPVCGDTTGSSVTLGCLVKGYFPEP | FYPKDINVKWKIDGSERQNGVLNSWT |
| | VTLTWNSGSLSSGVHTFPAVLQSDLYT | DQDSKDSTYSMSSTLTLTKDEYERHNS |
| | LSSSVTVTSSTWPSQSITCNVAHPASST | YTCEATHKTSTSPIVKSFNRNEC (SEQ |
| | KVDKKIEPRGPTIKPCPPCKCPAPNLLG | ID NO: 681) |
| | GPSVFIFPPKIKDVLMISLSPIVTCVVVD | |
| | VSEDDPDVQISWFVNNVEVHTAQTQT | |
| | HREDYNSTLRVVSALPIQHQDWMSGK | |
| | EFKCKVNNKDLPAPIERTISKPKGSVRA | |
| | PQVYVLPPPEEEMTKKQVTLTCMVTD | |
| | FMPEDIYVEWTNNGKTELNYKNTEPV | |
| | LDSDGSYFMYSKLRVEKKNWVERNSY | |
| | SCSVVHEGLHNHHTTKSFSRTPGK | |
| | (SEQ ID NO: 680) | |
| I23RB6 | QVQLVQSGAEVKKPGSSVKVSCKASG | DIVMTQSPDSLAVSLGERATINCKSSQS |
| | GTFSSYAISWVRQAPGQGLEWMGGIIP | VLYSSNNKNYLAWYQQKPGQPPKLLI |
| | IFGTANYAQKFQGRVTITADESTSTAY | YWASTRESGVPDRFSGSGSGTDFTLTIS |
| | MELSSLRSEDTAVYYCARGRYIRSYDY | SLQAEDVAVYYCQQYYSTPLTFGQGT |
| | FDYWGQGTLVTVSSAKTTAPSVYPLA | KVEIKRADAAPTVSIFPPSSEQLTSGGA |
| | PVCGDTTGSSVTLGCLVKGYFPEPVTL | SVVCFLNNFYPKDINVKWKIDGSERQN |
| | TWNSGSLSSGVHTFPAVLQSDLYTLSS | GVLNSWTDQDSKDSTYSMSSTLTLTK |
| | SVTVTSSTWPSQSITCNVAHPASSTKV | DEYERHNSYTCEATHKTSTSPIVKSFN |
| | DKKIEPRGPTIKPCPPCKCPAPNLLGGP | RNEC (SEQ ID NO: 683) |
| | SVFIFPPKIKDVLMISLSPIVTCVVVDVS | |
| | EDDPDVQISWFVNNVEVHTAQTQTHR | |
| | EDYNSTLRVVSALPIQHQDWMSGKEF | |
| | KCKVNNKDLPAPIERTISKPKGSVRAP | |
| | QVYVLPPPEEEMTKKQVTLTCMVTDF | |
| | MPEDIYVEWTNNGKTELNYKNTEPVL | |
| | DSDGSYFMYSKLRVEKKNWVERNSYS | |
| | CSVVHEGLHNHHTTKSFSRTPGK (SEQ | |
| | ID NO: 682) | |
| I23RB7 | QIQLVQSGPELKKPGETVKISCKASGY | QIVLTQSPAIMSASPGEKVTMTCSASSS |
| | TFTTYGMSWVKQAPGKGLKWMGWIN | VSYMYWYQQKPGSSPRLLIYDTSNLA |
| | TYSGVPTYADDFKGRFAFSLETSASTA | SGVPVRFSGSGSGTSYSLTISRMEAED |
| | YLQINNLKNEDTATYYCARRDRYGYV | AATYYCQQWSSYPWTFGGGTKLEIKR |
| | AGAFAYWGQGTLVTVSSAKTTAPSVY | ADAAPTVSIFPPSSEQLTSGGASVVCFL |
| | PLAPVCGDTTGSSVTLGCLVKGYFPEP | NNFYPKDINVKWKIDGSERQNGVLNS |
| | VTLTWNSGSLSSGVHTFPAVLQSDLYT | WTDQDSKDSTYSMSSTLTLTKDEYER |
| | LSSSVTVTSSTWPSQSITCNVAHPASST | HNSYTCEATHKTSTSPIVKSFNRNEC |
| | KVDKKIEPRGPTIKPCPPCKCPAPNLLG | (SEQ ID NO: 685) |
| | GPSVFIFPPKIKDVLMISLSPIVTCVVVD | |
| | VSEDDPDVQISWFVNNVEVHTAQTQT | |
| | HREDYNSTLRVVSALPIQHQDWMSGK | |
| | EFKCKVNNKDLPAPIERTISKPKGSVRA | |
| | PQVYVLPPPEEEMTKKQVTLTCMVTD | |
| | FMPEDIYVEWTNNGKTELNYKNTEPV | |
| | LDSDGSYFMYSKLRVEKKNWVERNSY | |
| | SCSVVHEGLHNHHTTKSFSRTPGK | |
| | (SEQ ID NO: 684) | |
| I23RB8 | QVQLVQSGAEVKKPGSSVKVSCKASG | EIVLTQSPATLSLSPGERATLSCRASQS |
| | GTFKTDYINWVRQAPGQGLEWMGGII | VSSYLAWYQQKPGQAPRLLIYDASNR |
| | PIFGTANYAQKFQGRVTITADESTSTA | ATGIPARFSGSGSGTDFTLTISSLEPEDF |
| | YMELSSLRSEDTAVYYCARGPSYAYG | AVYYCQQRSNWPLTFGQGTKVEIKRA |
| | SRTYGYFDYWGQGTLVTVSSAKTTAP | DAAPTVSIFPPSSEQLTSGGASVVCFLN |
| | SVYPLAPVCGDTTGSSVTLGCLVKGYF | NFYPKDINVKWKIDGSERQNGVLNSW |
| | PEPVTLTWNSGSLSSGVHTFPAVLQSD | TDQDSKDSTYSMSSTLTLTKDEYERHN |
| | LYTLSSSVTVTSSTWPSQSITCNVAHPA | SYTCEATHKTSTSPIVKSFNRNEC (SEQ |
| | SSTKVDKKIEPRGPTIKPCPPCKCPAPN | ID NO: 687) |
| | LLGGPSVFIFPPKIKDVLMISLSPIVTCV | |
| | VVDVSEDDPDVQISWFVNNVEVHTAQ | |
| | TQTHREDYNSTLRVVSALPIQHQDWM | |
| | SGKEFKCKVNNKDLPAPIERTISKPKGS | |
| | VRAPQVYVLPPPEEEMTKKQVTLTCM | |
| | VTDFMPEDIYVEWTNNGKTELNYKNT | |
| | EPVLDSDGSYFMYSKLRVEKKNWVER | |
| | NSYSCSVVHEGLHNHHTTKSFSRTPGK | |
| | (SEQ ID NO: 686) | |
| I23RB9 | QVQLVQSGAEVKKPGSSVKVSCKASG | EIVLTQSPATLSLSPGERATLSCRASQS |
| | GTFSSYAISWVRQAPGQGLEWMGGIIP | VSSYLAWYQQKPGQAPRLLIYDASNR |
| | IFGTANYAQKFQGRVTITADESTSTAY | ATGIPARFSGSGSGTDFTLTISSLEPEDF |
| | MELSSLRSEDTAVYYCARDRSYSYGLS | AVYYCQQRSNWPLTFGQGTKVEIKRA |
| | GLGYYGFDYWGQGTLVTVSSAKTTAP | DAAPTVSIFPPSSEQLTSGGASVVCFLN |
| | SVYPLAPVCGDTTGSSVTLGCLVKGYF | NFYPKDINVKWKIDGSERQNGVLNSW |
| | PEPVTLTWNSGSLSSGVHTFPAVLQSD | TDQDSKDSTYSMSSTLTLTKDEYERHN |
| | LYTLSSSVTVTSSTWPSQSITCNVAHPA | SYTCEATHKTSTSPIVKSFNRNEC (SEQ |
| | SSTKVDKKIEPRGPTIKPCPPCKCPAPN | ID NO: 689) |
| | LLGGPSVFIFPPKIKDVLMISLSPIVTCV | |
| | VVDVSEDDPDVQISWFVNNVEVHTAQ | |
| | TQTHREDYNSTLRVVSALPIQHQDWM | |
| | SGKEFKCKVNNKDLPAPIERTISKPKGS | |
| | VRAPQVYVLPPPEEEMTKKQVTLTCM | |
| | VTDFMPEDIYVEWTNNGKTELNYKNT | |
| | EPVLDSDGSYFMYSKLRVEKKNWVER | |
| | NSYSCSVVHEGLHNHHTTKSFSRTPGK | |
| | (SEQ ID NO: 688) | |
| I23RB10 | QVQLVQSGAEVKKPGSSVKVSCKASG | DIVMTQSPDSLAVSLGERATINCKSSQS |
| | GTFSSYAIHWVRQAPGQGLEWMGRIIP | VLYSSNNKNYLAWYQQKPGQPPKLLI |
| | ISGRANYAQKFQGRVTITADESTSTAY | YWASTRESGVPDRFSGSGSGTDFTLTIS |
| | MELSSLRSEDTAVYYCARDSYPSYGSG | SLQAEDVAVYYCQQYYSTPLTFGQGT |
| | GAFGYWGQGTLVTVSSAKTTAPSVYP | KVEIKRADAAPTVSIFPPSSEQLTSGGA |
| | LAPVCGDTTGSSVTLGCLVKGYFPEPV | SVVCFLNNFYPKDINVKWKIDGSERQN |
| | TLTWNSGSLSSGVHTFPAVLQSDLYTL | GVLNSWTDQDSKDSTYSMSSTLTLTK |
| | SSSVTVTSSTWPSQSITCNVAHPASSTK | DEYERHNSYTCEATHKTSTSPIVKSFN |
| | VDKKIEPRGPTIKPCPPCKCPAPNLLGG | RNEC (SEQ ID NO: 691) |
| | PSVFIFPPKIKDVLMISLSPIVTCVVVDV | |
| | SEDDPDVQISWFVNNVEVHTAQTQTH | |
| | REDYNSTLRVVSALPIQHQDWMSGKE | |
| | FKCKVNNKDLPAPIERTISKPKGSVRAP | |
| | QVYVLPPPEEEMTKKQVTLTCMVTDF | |
| | MPEDIYVEWTNNGKTELNYKNTEPVL | |
| | DSDGSYFMYSKLRVEKKNWVERNSYS | |
| | CSVVHEGLHNHHTTKSFSRTPGK (SEQ | |
| | ID NO: 690) | |
| I23RB25 | QVQLVQSGAEVKKPGSSVKVSCKASG | DIQMTQSPSSLSASVGDRVTITCRASQS |
| 9 | GTFSSYGISWVRQAPGQGLEWMGWIS | ISNDLNWYQQKPGKAPKLLIYAASSLQ |
| | PIFGTTNYAQKFQGRVTITADESTSTAY | SGVPSRFSGSGSGTDFTLTISSLQPEDF |
| | MELSSLRSEDTAVYYCARMMMQSLD | ATYYCQQSYSTPLTFGQGTKVEIKRAD |
| | YWGQGTLVTVSSAKTTAPSVYPLAPV | AAPTVSIFPPSSEQLTSGGASVVCFLNN |
| | CGDTTGSSVTLGCLVKGYFPEPVTLTW | FYPKDINVKWKIDGSERQNGVLNSWT |
| | NSGSLSSGVHTFPAVLQSDLYTLSSSVT | DQDSKDSTYSMSSTLTLTKDEYERHNS |
| | VTSSTWPSQSITCNVAHPASSTKVDKKI | YTCEATHKTSTSPIVKSFNRNEC (SEQ |
| | EPRGPTIKPCPPCKCPAPNLLGGPSVFIF | ID NO: 693) |
| | PPKIKDVLMISLSPIVTCVVVDVSEDDP | |
| | DVQISWFVNNVEVHTAQTQTHREDYN | |
| | STLRVVSALPIQHQDWMSGKEFKCKV | |
| | NNKDLPAPIERTISKPKGSVRAPQVYV | |
| | LPPPEEEMTKKQVTLTCMVTDFMPEDI | |
| | YVEWTNNGKTELNYKNTEPVLDSDGS | |
| | YFMYSKLRVEKKNWVERNSYSCSVVH | |
| | EGLHNHHTTKSFSRTPGK (SEQ ID | |
| | NO: 692) | |
| I23RB26 | QVQLVQSGAEVKKPGSSVKVSCKASG | DIVMTQSPDSLAVSLGERATINCKSSQS |
| 0 | GTFSSYGISWVRQAPGQGLEWMGGIIP | VLYSSNNKNYLAWYQQKPGQPPKLLI |
| | IFGTANYAQKFQGRVTITADESTSTAY | YSASTRESGVPDRFSGSGSGTDFTLTIS |
| | MELSSLRSEDTAVYYCARDFGWSLWF | SLQAEDVAVYYCQQSFHVPWTFGQGT |
| | DYWGQGTLVTVSSAKTTAPSVYPLAP | KVEIKRADAAPTVSIFPPSSEQLTSGGA |
| | VCGDTTGSSVTLGCLVKGYFPEPVTLT | SVVCFLNNFYPKDINVKWKIDGSERQN |
| | WNSGSLSSGVHTFPAVLQSDLYTLSSS | GVLNSWTDQDSKDSTYSMSSTLTLTK |
| | VTVTSSTWPSQSITCNVAHPASSTKVD | DEYERHNSYTCEATHKTSTSPIVKSFN |
| | KKIEPRGPTIKPCPPCKCPAPNLLGGPS | RNEC (SEQ ID NO: 695) |
| | VFIFPPKIKDVLMISLSPIVTCVVVDVSE | |
| | DDPDVQISWFVNNVEVHTAQTQTHRE | |
| | DYNSTLRVVSALPIQHQDWMSGKEFK | |
| | CKVNNKDLPAPIERTISKPKGSVRAPQ | |
| | VYVLPPPEEEMTKKQVTLTCMVTDFM | |
| | PEDIYVEWTNNGKTELNYKNTEPVLDS | |
| | DGSYFMYSKLRVEKKNWVERNSYSCS | |
| | VVHEGLHNHHTTKSFSRTPGK (SEQ ID | |
| | NO: 694) | |
| I23RB26 | QVQLVQSGAEVKKPGSSVKVSCKASG | DIQMTQSPSSLSASVGDRVTITCRASQS |
| 1 | GTFSSYAISWVRQAPGQGLEWMGWIS | INDDLNWYQQKPGKAPKLLIYAASSL |
| | PYFGTANYAQKFQGRVTITADESTSTA | QSGVPSRFSGSGSGTDFTLTISSLQPED |
| | YMELSSLRSEDTAVYYCARMYRQGFD | FATYYCQQSYSTPLTFGQGTKVEIKRA |
| | YWGQGTLVTVSSAKTTAPSVYPLAPV | DAAPTVSIFPPSSEQLTSGGASVVCFLN |
| | CGDTTGSSVTLGCLVKGYFPEPVTLTW | NFYPKDINVKWKIDGSERQNGVLNSW |
| | NSGSLSSGVHTFPAVLQSDLYTLSSSVT | TDQDSKDSTYSMSSTLTLTKDEYERHN |
| | VTSSTWPSQSITCNVAHPASSTKVDKKI | SYTCEATHKTSTSPIVKSFNRNEC (SEQ |
| | EPRGPTIKPCPPCKCPAPNLLGGPSVFIF | ID NO: 697) |
| | PPKIKDVLMISLSPIVTCVVVDVSEDDP | |
| | DVQISWFVNNVEVHTAQTQTHREDYN | |
| | STLRVVSALPIQHQDWMSGKEFKCKV | |
| | NNKDLPAPIERTISKPKGSVRAPQVYV | |
| | LPPPEEEMTKKQVTLTCMVTDFMPEDI | |
| | YVEWTNNGKTELNYKNTEPVLDSDGS | |
| | YFMYSKLRVEKKNWVERNSYSCSVVH | |
| | EGLHNHHTTKSFSRTPGK (SEQ ID | |
| | NO: 696) | |
| I23RB26 | QVQLVQSGAEVKKPGSSVKVSCKASG | DIQMTQSPSSLSASVGDRVTITCRASQS |
| 2 | GTFSSYGISWVRQAPGQGLEWMGWIS | INKDLNWYQQKPGKAPKLLIYFASSLQ |
| | AIFGTANYAQKFQGRVTITADESTSTA | SGVPSRFSGSGSGTDFTLTISSLQPEDF |
| | YMELSSLRSEDTAVYYCARMLKQGFD | ATYYCQQSYSTPLTFGQGTKVEIKRAD |
| | YWGQGTLVTVSSAKTTAPSVYPLAPV | AAPTVSIFPPSSEQLTSGGASVVCFLNN |
| | CGDTTGSSVTLGCLVKGYFPEPVTLTW | FYPKDINVKWKIDGSERQNGVLNSWT |
| | NSGSLSSGVHTFPAVLQSDLYTLSSSVT | DQDSKDSTYSMSSTLTLTKDEYERHNS |
| | VTSSTWPSQSITCNVAHPASSTKVDKKI | YTCEATHKTSTSPIVKSFNRNEC (SEQ |
| | EPRGPTIKPCPPCKCPAPNLLGGPSVFIF | ID NO: 699) |
| | PPKIKDVLMISLSPIVTCVVVDVSEDDP | |
| | DVQISWFVNNVEVHTAQTQTHREDYN | |
| | STLRVVSALPIQHQDWMSGKEFKCKV | |
| | NNKDLPAPIERTISKPKGSVRAPQVYV | |
| | LPPPEEEMTKKQVTLTCMVTDFMPEDI | |
| | YVEWTNNGKTELNYKNTEPVLDSDGS | |
| | YFMYSKLRVEKKNWVERNSYSCSVVH | |
| | EGLHNHHTTKSFSRTPGK (SEQ ID | |
| | NO: 698) | |
| I23RB26 | QVQLVQSGAEVKKPGSSVKVSCKASG | DIQMTQSPSSLSASVGDRVTITCRASQS |
| 3 | GTFSSYAISWVRQAPGQGLEWMGGIIP | ISSYLNWYQQKPGKAPKLLIYAASSLQ |
| | IFGTANYAQKFQGRVTITADESTSTAY | SGVPSRFSGSGSGTDFTLTISSLQPEDF |
| | MELSSLRSEDTAVYYCARFHRFWLDY | ATYYCQQPYSVPFTFGQGTKVEIKRAD |
| | WGQGTLVTVSSAKTTAPSVYPLAPVC | AAPTVSIFPPSSEQLTSGGASVVCFLNN |
| | GDTTGSSVTLGCLVKGYFPEPVTLTWN | FYPKDINVKWKIDGSERQNGVLNSWT |
| | SGSLSSGVHTFPAVLQSDLYTLSSSVTV | DQDSKDSTYSMSSTLTLTKDEYERHNS |
| | TSSTWPSQSITCNVAHPASSTKVDKKIE | YTCEATHKTSTSPIVKSFNRNEC (SEQ |
| | PRGPTIKPCPPCKCPAPNLLGGPSVFIFP | ID NO: 701) |
| | PKIKDVLMISLSPIVTCVVVDVSEDDPD | |
| | VQISWFVNNVEVHTAQTQTHREDYNS | |
| | TLRVVSALPIQHQDWMSGKEFKCKVN | |
| | NKDLPAPIERTISKPKGSVRAPQVYVLP | |
| | PPEEEMTKKQVTLTCMVTDFMPEDIY | |
| | VEWTNNGKTELNYKNTEPVLDSDGSY | |
| | FMYSKLRVEKKNWVERNSYSCSVVHE | |
| | GLHNHHTTKSFSRTPGK (SEQ ID | |
| | NO: 700) | |
| I23RB26 | QVQLVQSGAEVKKPGSSVKVSCKASG | DIQMTQSPSSLSASVGDRVTITCRASQS |
| 4 | GTFSSYAISWVRQAPGQGLEWMGGIIP | IDNDLNWYQQKPGKAPKLLIYNASSL |
| | IFGTANYAQKFQGRVTITADESTSTAY | QSGVPSRFSGSGSGTDFTLTISSLQPED |
| | MELSSLRSEDTAVYYCARRSSPGFDY | FATYYCQQPYSIPLTFGQGTKVEIKRA |
| | WGQGTLVTVSSAKTTAPSVYPLAPVC | DAAPTVSIFPPSSEQLTSGGASVVCFLN |
| | GDTTGSSVTLGCLVKGYFPEPVTLTWN | NFYPKDINVKWKIDGSERQNGVLNSW |
| | SGSLSSGVHTFPAVLQSDLYTLSSSVTV | TDQDSKDSTYSMSSTLTLTKDEYERHN |
| | TSSTWPSQSITCNVAHPASSTKVDKKIE | SYTCEATHKTSTSPIVKSFNRNEC (SEQ |
| | PRGPTIKPCPPCKCPAPNLLGGPSVFIFP | ID NO: 703) |
| | PKIKDVLMISLSPIVTCVVVDVSEDDPD | |
| | VQISWFVNNVEVHTAQTQTHREDYNS | |
| | TLRVVSALPIQHQDWMSGKEFKCKVN | |
| | NKDLPAPIERTISKPKGSVRAPQVYVLP | |
| | PPEEEMTKKQVTLTCMVTDFMPEDIY | |
| | VEWTNNGKTELNYKNTEPVLDSDGSY | |
| | FMYSKLRVEKKNWVERNSYSCSVVHE | |
| | GLHNHHTTKSFSRTPGK (SEQ ID | |
| | NO: 702) | |
| I23RB26 | QVQLVQSGAEVKKPGSSVKVSCKASG | DIQMTQSPSSLSASVGDRVTITCRASQS |
| 5 | GTFSSYAISWVRQAPGQGLEWMGGIIP | ISTWLNWYQQKPGKAPKLLIYKASSLQ |
| | IFGTANYAQKFQGRVTITADESTSTAY | SGVPSRFSGSGSGTDFTLTISSLQPEDF |
| | MELSSLRSEDTAVYYCARGFVPTQGSL | ATYYCQQYNSPPLTFGQGTKVEIKRAD |
| | DYWGQGTLVTVSSAKTTAPSVYPLAP | AAPTVSIFPPSSEQLTSGGASVVCFLNN |
| | VCGDTTGSSVTLGCLVKGYFPEPVTLT | FYPKDINVKWKIDGSERQNGVLNSWT |
| | WNSGSLSSGVHTFPAVLQSDLYTLSSS | DQDSKDSTYSMSSTLTLTKDEYERHNS |
| | VTVTSSTWPSQSITCNVAHPASSTKVD | YTCEATHKTSTSPIVKSFNRNEC (SEQ |
| | KKIEPRGPTIKPCPPCKCPAPNLLGGPS | ID NO: 705) |
| | VFIFPPKIKDVLMISLSPIVTCVVVDVSE | |
| | DDPDVQISWFVNNVEVHTAQTQTHRE | |
| | DYNSTLRVVSALPIQHQDWMSGKEFK | |
| | CKVNNKDLPAPIERTISKPKGSVRAPQ | |
| | VYVLPPPEEEMTKKQVTLTCMVTDFM | |
| | PEDIYVEWTNNGKTELNYKNTEPVLDS | |
| | DGSYFMYSKLRVEKKNWVERNSYSCS | |
| | VVHEGLHNHHTTKSFSRTPGK (SEQ ID | |
| | NO: 704) | |
| I23RB26 | EVQLLESGGGLVQPGGSLRLSCAASGF | DIQMTQSPSSLSASVGDRVTITCRASQS |
| 6 | TFSDYSMSWVRQAPGKGLEWVSVISG | ISSYLNWYQQKPGKAPKLLIYAASSLQ |
| | SGGSTYYADSVKGRFTISRDNSKNTLY | SGVPSRFSGSGSGTDFTLTISSLQPEDF |
| | LQMNSLRAEDTAVYYCAKHSMAGNS | ATYYCQQSYSTPLTFGQGTKVEIKRAD |
| | FLRFLDYWGQGTLVTVSSAKTTAPSV | AAPTVSIFPPSSEQLTSGGASVVCFLNN |
| | YPLAPVCGDTTGSSVTLGCLVKGYFPE | FYPKDINVKWKIDGSERQNGVLNSWT |
| | PVTLTWNSGSLSSGVHTFPAVLQSDLY | DQDSKDSTYSMSSTLTLTKDEYERHNS |
| | TLSSSVTVTSSTWPSQSITCNVAHPASS | YTCEATHKTSTSPIVKSFNRNEC (SEQ |
| | TKVDKKIEPRGPTIKPCPPCKCPAPNLL | ID NO: 707) |
| | GGPSVFIFPPKIKDVLMISLSPIVTCVVV | |
| | DVSEDDPDVQISWFVNNVEVHTAQTQ | |
| | THREDYNSTLRVVSALPIQHQDWMSG | |
| | KEFKCKVNNKDLPAPIERTISKPKGSVR | |
| | APQVYVLPPPEEEMTKKQVTLTCMVT | |
| | DFMPEDIYVEWTNNGKTELNYKNTEP | |
| | VLDSDGSYFMYSKLRVEKKNWVERNS | |
| | YSCSVVHEGLHNHHTTKSFSRTPGK | |
| | (SEQ ID NO: 706) | |
| I23RB26 | EVQLVQSGAEVKKPGESLKISCKGSGY | EIVLTQSPGTLSLSPGERATLSCRASQS |
| 7 | SFTSYWIGWVRQMPGKGLEWMGIIYP | VSSSYLAWYQQKPGQAPRLLIYGASSR |
| | GDSDTRYSPSFQGQVTISADKSISTAYL | ATGIPDRFSGSGSGTDFTLTISRLEPEDF |
| | QWSSLKASDTAMYYCARVWYSSWDL | AVYYCQQYGSSPLTFGQGTKVEIKRA |
| | DYWGQGTLVTVSSAKTTAPSVYPLAP | DAAPTVSIFPPSSEQLTSGGASVVCFLN |
| | VCGDTTGSSVTLGCLVKGYFPEPVTLT | NFYPKDINVKWKIDGSERQNGVLNSW |
| | WNSGSLSSGVHTFPAVLQSDLYTLSSS | TDQDSKDSTYSMSSTLTLTKDEYERHN |
| | VTVTSSTWPSQSITCNVAHPASSTKVD | SYTCEATHKTSTSPIVKSFNRNEC (SEQ |
| | KKIEPRGPTIKPCPPCKCPAPNLLGGPS | ID NO: 709) |
| | VFIFPPKIKDVLMISLSPIVTCVVVDVSE | |
| | DDPDVQISWFVNNVEVHTAQTQTHRE | |
| | DYNSTLRVVSALPIQHQDWMSGKEFK | |
| | CKVNNKDLPAPIERTISKPKGSVRAPQ | |
| | VYVLPPPEEEMTKKQVTLTCMVTDFM | |
| | PEDIYVEWTNNGKTELNYKNTEPVLDS | |
| | DGSYFMYSKLRVEKKNWVERNSYSCS | |
| | VVHEGLHNHHTTKSFSRTPGK (SEQ ID | |
| | NO: 708) | |
| I23RB26 | QVQLVQSGAEVKKPGSSVKVSCKASG | EIVLTQSPATLSLSPGERATLSCRASQS |
| 8 | GTFSSYYIHWVRQAPGQGLEWMGGIIP | VSSYLAWYQQKPGQAPRLLIYDASNR |
| | IFGYANYAQKFQGRVTITADESTSTAY | ATGIPARFSGSGSGTDFTLTISSLEPEDF |
| | MELSSLRSEDTAVYYCARDPGSYGSV | AVYYCQQRSNWPLTFGQGTKVEIKRA |
| | YYRRSYYFDYWGQGTLVTVSSAKTTA | DAAPTVSIFPPSSEQLTSGGASVVCFLN |
| | PSVYPLAPVCGDTTGSSVTLGCLVKGY | NFYPKDINVKWKIDGSERQNGVLNSW |
| | FPEPVTLTWNSGSLSSGVHTFPAVLQS | TDQDSKDSTYSMSSTLTLTKDEYERHN |
| | DLYTLSSSVTVTSSTWPSQSITCNVAHP | SYTCEATHKTSTSPIVKSFNRNEC (SEQ |
| | ASSTKVDKKIEPRGPTIKPCPPCKCPAP | ID NO: 711) |
| | NLLGGPSVFIFPPKIKDVLMISLSPIVTC | |
| | VVVDVSEDDPDVQISWFVNNVEVHTA | |
| | QTQTHREDYNSTLRVVSALPIQHQDW | |
| | MSGKEFKCKVNNKDLPAPIERTISKPK | |
| | GSVRAPQVYVLPPPEEEMTKKQVTLTC | |
| | MVTDFMPEDIYVEWTNNGKTELNYKN | |
| | TEPVLDSDGSYFMYSKLRVEKKNWVE | |
| | RNSYSCSVVHEGLHNHHTTKSFSRTPG | |
| | K (SEQ ID NO: 710) | |
| I23RB26 | QVQLVQSGAEVKKPGSSVKVSCKASG | EIVLTQSPGTLSLSPGERATLSCRASQS |
| 9 | GTFSDASISWVRQAPGQGLEWMGTIIPI | VSSSYLAWYQQKPGQAPRLLIYGASSR |
| | SGNANYAQKFQGRVTITADESTSTAY | ATGIPDRFSGSGSGTDFTLTISRLEPEDF |
| | MELSSLRSEDTAVYYCARDRYVWYY | AVYYCQQYGSSPLTFGQGTKVEIKRA |
| | WDGYFDYWGQGTLVTVSSAKTTAPSV | DAAPTVSIFPPSSEQLTSGGASVVCFLN |
| | YPLAPVCGDTTGSSVTLGCLVKGYFPE | NFYPKDINVKWKIDGSERQNGVLNSW |
| | PVTLTWNSGSLSSGVHTFPAVLQSDLY | TDQDSKDSTYSMSSTLTLTKDEYERHN |
| | TLSSSVTVTSSTWPSQSITCNVAHPASS | SYTCEATHKTSTSPIVKSFNRNEC (SEQ |
| | TKVDKKIEPRGPTIKPCPPCKCPAPNLL | ID NO: 713) |
| | GGPSVFIFPPKIKDVLMISLSPIVTCVVV | |
| | DVSEDDPDVQISWFVNNVEVHTAQTQ | |
| | THREDYNSTLRVVSALPIQHQDWMSG | |
| | KEFKCKVNNKDLPAPIERTISKPKGSVR | |
| | APQVYVLPPPEEEMTKKQVTLTCMVT | |
| | DFMPEDIYVEWTNNGKTELNYKNTEP | |
| | VLDSDGSYFMYSKLRVEKKNWVERNS | |
| | YSCSVVHEGLHNHHTTKSFSRTPGK | |
| | (SEQ ID NO: 712) | |
| I23RB27 | QVQLVQSGAEVKKPGSSVKVSCKASG | EIVLTQSPATLSLSPGERATLSCRASQS |
| 0 | GTFDSYAISWVRQAPGQGLEWMGGIIP | VSSYLAWYQQKPGQAPRLLIYDASNR |
| | ISGYANYAQKFQGRVTITADESTSTAY | ATGIPARFSGSGSGTDFTLTISSLEPEDF |
| | MELSSLRSEDTAVYYCARDLSGGYLG | AVYYCQQRSNWPLTFGQGTKVEIKRA |
| | LRTLYYYYFDYWGQGTLVTVSSAKTT | DAAPTVSIFPPSSEQLTSGGASVVCFLN |
| | APSVYPLAPVCGDTTGSSVTLGCLVKG | NFYPKDINVKWKIDGSERQNGVLNSW |
| | YFPEPVTLTWNSGSLSSGVHTFPAVLQ | TDQDSKDSTYSMSSTLTLTKDEYERHN |
| | SDLYTLSSSVTVTSSTWPSQSITCNVAH | SYTCEATHKTSTSPIVKSFNRNEC (SEQ |
| | PASSTKVDKKIEPRGPTIKPCPPCKCPA | ID NO: 715) |
| | PNLLGGPSVFIFPPKIKDVLMISLSPIVT | |
| | CVVVDVSEDDPDVQISWFVNNVEVHT | |
| | AQTQTHREDYNSTLRVVSALPIQHQD | |
| | WMSGKEFKCKVNNKDLPAPIERTISKP | |
| | KGSVRAPQVYVLPPPEEEMTKKQVTL | |
| | TCMVTDFMPEDIYVEWTNNGKTELNY | |
| | KNTEPVLDSDGSYFMYSKLRVEKKNW | |
| | VERNSYSCSVVHEGLHNHHTTKSFSRT | |
| | PGK (SEQ ID NO: 714) | |
| I23RB27 | EVQLLESGGGLVQPGGSLRLSCAASGF | DIQMTQSPSSLSASVGDRVTITCRASQS |
| 1 | TFSSYAMSWVRQAPGKGLEWVSAISG | ISSYLNWYQQKPGKAPKLLIYAASSLQ |
| | SGGSTYYADSVKGRFTISRDNSKNTLY | SGVPSRFSGSGSGTDFTLTISSLQPEDF |
| | LQMNSLRAEDTAVYYCARDRGSAETF | ATYYCQQSYSTPLTFGQGTKVEIKRAD |
| | DYWGQGTLVTVSSAKTTAPSVYPLAP | AAPTVSIFPPSSEQLTSGGASVVCFLNN |
| | VCGDTTGSSVTLGCLVKGYFPEPVTLT | FYPKDINVKWKIDGSERQNGVLNSWT |
| | WNSGSLSSGVHTFPAVLQSDLYTLSSS | DQDSKDSTYSMSSTLTLTKDEYERHNS |
| | VTVTSSTWPSQSITCNVAHPASSTKVD | YTCEATHKTSTSPIVKSFNRNEC (SEQ |
| | KKIEPRGPTIKPCPPCKCPAPNLLGGPS | ID NO: 717) |
| | VFIFPPKIKDVLMISLSPIVTCVVVDVSE | |
| | DDPDVQISWFVNNVEVHTAQTQTHRE | |
| | DYNSTLRVVSALPIQHQDWMSGKEFK | |
| | CKVNNKDLPAPIERTISKPKGSVRAPQ | |
| | VYVLPPPEEEMTKKQVTLTCMVTDFM | |
| | PEDIYVEWTNNGKTELNYKNTEPVLDS | |
| | DGSYFMYSKLRVEKKNWVERNSYSCS | |
| | VVHEGLHNHHTTKSFSRTPGK (SEQ ID | |
| | NO: 716) | |
| I23RB27 | EVQLLESGGGLVQPGGSLRLSCAASGF | EIVLTQSPGTLSLSPGERATLSCRASQS |
| 2 | TFSSYAMSWVRQAPGKGLEWVSAISG | VSSSYLAWYQQKPGQAPRLLIYGASSR |
| | SGGSTYYADSVKGRFTISRDNSKNTLY | ATGIPDRFSGSGSGTDFTLTISRLEPEDF |
| | LQMNSLRAEDTAVYYCARDFGEPNGG | AVYYCQQYGSSPLTFGQGTKVEIKRA |
| | FDYWGQGTLVTVSSAKTTAPSVYPLA | DAAPTVSIFPPSSEQLTSGGASVVCFLN |
| | PVCGDTTGSSVTLGCLVKGYFPEPVTL | NFYPKDINVKWKIDGSERQNGVLNSW |
| | TWNSGSLSSGVHTFPAVLQSDLYTLSS | TDQDSKDSTYSMSSTLTLTKDEYERHN |
| | SVTVTSSTWPSQSITCNVAHPASSTKV | SYTCEATHKTSTSPIVKSFNRNEC (SEQ |
| | DKKIEPRGPTIKPCPPCKCPAPNLLGGP | ID NO: 719) |
| | SVFIFPPKIKDVLMISLSPIVTCVVVDVS | |
| | EDDPDVQISWFVNNVEVHTAQTQTHR | |
| | EDYNSTLRVVSALPIQHQDWMSGKEF | |
| | KCKVNNKDLPAPIERTISKPKGSVRAP | |
| | QVYVLPPPEEEMTKKQVTLTCMVTDF | |
| | MPEDIYVEWTNNGKTELNYKNTEPVL | |
| | DSDGSYFMYSKLRVEKKNWVERNSYS | |
| | CSVVHEGLHNHHTTKSFSRTPGK (SEQ | |
| | ID NO: 718) | |
| I23RB27 | EVQLLESGGGLVQPGGSLRLSCAASGF | DIQMTQSPSSLSASVGDRVTITCRASQS |
| 3 | TFSSYAMSWVRQAPGKGLEWVSAISG | ISSYLNWYQQKPGKAPKLLIYAASSLQ |
| | SGGSTYYADSVKGRFTISRDNSKNTLY | SGVPSRFSGSGSGTDFTLTISSLQPEDF |
| | LQMNSLRAEDTAVYYCARDPSSYYYN | ATYYCQQSYSTPLTFGQGTKVEIKRAD |
| | GYLGSYAFDYWGQGTLVTVSSAKTTA | AAPTVSIFPPSSEQLTSGGASVVCFLNN |
| | PSVYPLAPVCGDTTGSSVTLGCLVKGY | FYPKDINVKWKIDGSERQNGVLNSWT |
| | FPEPVTLTWNSGSLSSGVHTFPAVLQS | DQDSKDSTYSMSSTLTLTKDEYERHNS |
| | DLYTLSSSVTVTSSTWPSQSITCNVAHP | YTCEATHKTSTSPIVKSFNRNEC (SEQ |
| | ASSTKVDKKIEPRGPTIKPCPPCKCPAP | ID NO: 721) |
| | NLLGGPSVFIFPPKIKDVLMISLSPIVTC | |
| | VVVDVSEDDPDVQISWFVNNVEVHTA | |
| | QTQTHREDYNSTLRVVSALPIQHQDW | |
| | MSGKEFKCKVNNKDLPAPIERTISKPK | |
| | GSVRAPQVYVLPPPEEEMTKKQVTLTC | |
| | MVTDFMPEDIYVEWTNNGKTELNYKN | |
| | TEPVLDSDGSYFMYSKLRVEKKNWVE | |
| | RNSYSCSVVHEGLHNHHTTKSFSRTPG | |
| | K (SEQ ID NO: 720) | |
| I23RB27 | EVQLLESGGGLVQPGGSLRLSCAASGF | DIQMTQSPSSLSASVGDRVTITCRASQS |
| 4 | TFSSYAMSWVRQAPGKGLEWVSAISG | ISSYLNWYQQKPGKAPKLLIYAASSLQ |
| | SGGSTYYADSVKGRFTISRDNSKNTLY | SGVPSRFSGSGSGTDFTLTISSLQPEDF |
| | LQMNSLRAEDTAVYYCAREDATDSSD | ATYYCQQSYSTPLTFGQGTKVEIKRAD |
| | YYFDYWGQGTLVTVSSAKTTAPSVYP | AAPTVSIFPPSSEQLTSGGASVVCFLNN |
| | LAPVCGDTTGSSVTLGCLVKGYFPEPV | FYPKDINVKWKIDGSERQNGVLNSWT |
| | TLTWNSGSLSSGVHTFPAVLQSDLYTL | DQDSKDSTYSMSSTLTLTKDEYERHNS |
| | SSSVTVTSSTWPSQSITCNVAHPASSTK | YTCEATHKTSTSPIVKSFNRNEC (SEQ |
| | VDKKIEPRGPTIKPCPPCKCPAPNLLGG | ID NO: 723) |
| | PSVFIFPPKIKDVLMISLSPIVTCVVVDV | |
| | SEDDPDVQISWFVNNVEVHTAQTQTH | |
| | REDYNSTLRVVSALPIQHQDWMSGKE | |
| | FKCKVNNKDLPAPIERTISKPKGSVRAP | |
| | QVYVLPPPEEEMTKKQVTLTCMVTDF | |
| | MPEDIYVEWTNNGKTELNYKNTEPVL | |
| | DSDGSYFMYSKLRVEKKNWVERNSYS | |
| | CSVVHEGLHNHHTTKSFSRTPGK (SEQ | |
| | ID NO: 722) | |
| I23RB27 | EVQLLESGGGLVQPGGSLRLSCAASGF | DIQMTQSPSSLSASVGDRVTITCRASQS |
| 5 | TFSDSGMSWVRQAPGKGLEWVSAIDG | ISSYLNWYQQKPGKAPKLLIYAASSLQ |
| | SGGTTYYADSVKGRFTISRDNSKNTLY | SGVPSRFSGSGSGTDFTLTISSLQPEDF |
| | LQMNSLRAEDTAVYYCARGSGGYVG | ATYYCQQSYSTPLTFGQGTKVEIKRAD |
| | YGGFDYWGQGTLVTVSSAKTTAPSVY | AAPTVSIFPPSSEQLTSGGASVVCFLNN |
| | PLAPVCGDTTGSSVTLGCLVKGYFPEP | FYPKDINVKWKIDGSERQNGVLNSWT |
| | VTLTWNSGSLSSGVHTFPAVLQSDLYT | DQDSKDSTYSMSSTLTLTKDEYERHNS |
| | LSSSVTVTSSTWPSQSITCNVAHPASST | |
| | KVDKKIEPRGPTIKPCPPCKCPAPNLLG | YTCEATHKTSTSPIVKSFNRNEC (SEQ |
| | GPSVFIFPPKIKDVLMISLSPIVTCVVVD | ID NO: 725) |
| | VSEDDPDVQISWFVNNVEVHTAQTQT | |
| | HREDYNSTLRVVSALPIQHQDWMSGK | |
| | EFKCKVNNKDLPAPIERTISKPKGSVRA | |
| | PQVYVLPPPEEEMTKKQVTLTCMVTD | |
| | FMPEDIYVEWTNNGKTELNYKNTEPV | |
| | LDSDGSYFMYSKLRVEKKNWVERNSY | |
| | SCSVVHEGLHNHHTTKSFSRTPGK | |
| | (SEQ ID NO: 724) | |
| I23RB27 | EVQLLESGGGLVQPGGSLRLSCAASGF | DIQMTQSPSSLSASVGDRVTITCRASQS |
| 6 | TFSNYAMSWVRQAPGKGLEWVSAISG | ISSYLNWYQQKPGKAPKLLIYAASSLQ |
| | SGGSTYYADSVKGRFTISRDNSKNTLY | SGVPSRFSGSGSGTDFTLTISSLQPEDF |
| | LQMNSLRAEDTAVYYCARDGSYGYR | ATYYCQQSYSTPLTFGQGTKVEIKRAD |
| | GRRRRYYDYFDYWGQGTLVTVSSAKT | AAPTVSIFPPSSEQLTSGGASVVCFLNN |
| | TAPSVYPLAPVCGDTTGSSVTLGCLVK | FYPKDINVKWKIDGSERQNGVLNSWT |
| | GYFPEPVTLTWNSGSLSSGVHTFPAVL | DQDSKDSTYSMSSTLTLTKDEYERHNS |
| | QSDLYTLSSSVTVTSSTWPSQSITCNVA | YTCEATHKTSTSPIVKSFNRNEC (SEQ |
| | HPASSTKVDKKIEPRGPTIKPCPPCKCP | ID NO: 727) |
| | APNLLGGPSVFIFPPKIKDVLMISLSPIV | |
| | TCVVVDVSEDDPDVQISWFVNNVEVH | |
| | TAQTQTHREDYNSTLRVVSALPIQHQD | |
| | WMSGKEFKCKVNNKDLPAPIERTISKP | |
| | KGSVRAPQVYVLPPPEEEMTKKQVTL | |
| | TCMVTDFMPEDIYVEWTNNGKTELNY | |
| | KNTEPVLDSDGSYFMYSKLRVEKKNW | |
| | VERNSYSCSVVHEGLHNHHTTKSFSRT | |
| | PGK (SEQ ID NO: 726) | |
| I23RB27 | EVQLLESGGGLVQPGGSLRLSCAASGF | DIQMTQSPSSLSASVGDRVTITCRASQS |
| 7 | TFSSYAMSWVRQAPGKGLEWVSAISG | ISSYLNWYQQKPGKAPKLLIYAASSLQ |
| | SGGSTYYADSVKGRFTISRDNSKNTLY | SGVPSRFSGSGSGTDFTLTISSLQPEDF |
| | LQMNSLRAEDTAVYYCARRRRYRYFD | ATYYCQQSYSTPLTFGQGTKVEIKRAD |
| | YWGQGTLVTVSSAKTTAPSVYPLAPV | AAPTVSIFPPSSEQLTSGGASVVCFLNN |
| | CGDTTGSSVTLGCLVKGYFPEPVTLTW | FYPKDINVKWKIDGSERQNGVLNSWT |
| | NSGSLSSGVHTFPAVLQSDLYTLSSSVT | DQDSKDSTYSMSSTLTLTKDEYERHNS |
| | VTSSTWPSQSITCNVAHPASSTKVDKKI | YTCEATHKTSTSPIVKSFNRNEC (SEQ |
| | EPRGPTIKPCPPCKCPAPNLLGGPSVFIF | ID NO: 729) |
| | PPKIKDVLMISLSPIVTCVVVDVSEDDP | |
| | DVQISWFVNNVEVHTAQTQTHREDYN | |
| | STLRVVSALPIQHQDWMSGKEFKCKV | |
| | NNKDLPAPIERTISKPKGSVRAPQVYV | |
| | LPPPEEEMTKKQVTLTCMVTDFMPEDI | |
| | YVEWTNNGKTELNYKNTEPVLDSDGS | |
| | YFMYSKLRVEKKNWVERNSYSCSVVH | |
| | EGLHNHHTTKSFSRTPGK (SEQ ID | |
| | NO: 728) | |
| I23RB27 | EVQLLESGGGLVQPGGSLRLSCAASGF | EIVLTQSPGTLSLSPGERATLSCRASQS |
| 8 | TFSSYAMSWVRQAPGKGLEWVSAISG | VSSSYLAWYQQKPGQAPRLLIYGASSR |
| | SGGSTYYADSVKGRFTISRDNSKNTLY | ATGIPDRFSGSGSGTDFTLTISRLEPEDF |
| | LQMNSLRAEDTAVYYCVRGGSLGGGF | AVYYCQQYGSSPLTFGQGTKVEIKRA |
| | YFDYWGQGTLVTVSSAKTTAPSVYPL | DAAPTVSIFPPSSEQLTSGGASVVCFLN |
| | APVCGDTTGSSVTLGCLVKGYFPEPVT | NFYPKDINVKWKIDGSERQNGVLNSW |
| | LTWNSGSLSSGVHTFPAVLQSDLYTLS | TDQDSKDSTYSMSSTLTLTKDEYERHN |
| | SSVTVTSSTWPSQSITCNVAHPASSTKV | SYTCEATHKTSTSPIVKSFNRNEC (SEQ |
| | DKKIEPRGPTIKPCPPCKCPAPNLLGGP | ID NO: 731) |
| | SVFIFPPKIKDVLMISLSPIVTCVVVDVS | |
| | EDDPDVQISWFVNNVEVHTAQTQTHR | |
| | EDYNSTLRVVSALPIQHQDWMSGKEF | |
| | KCKVNNKDLPAPIERTISKPKGSVRAP | |
| | QVYVLPPPEEEMTKKQVTLTCMVTDF | |
| | MPEDIYVEWTNNGKTELNYKNTEPVL | |
| | DSDGSYFMYSKLRVEKKNWVERNSYS | |
| | CSVVHEGLHNHHTTKSFSRTPGK (SEQ | |
| | ID NO: 730) | |
| I23RB27 | EVQLLESGGGLVQPGGSLRLSCAASGF | DIQMTQSPSSLSASVGDRVTITCRASQS |
| 9 | TFDTYAMHWVRQAPGKGLEWVSWIS | ISSYLNWYQQKPGKAPKLLIYAASSLQ |
| | GEGGSTEYADSVKGRFTISRDNSKNTL | SGVPSRFSGSGSGTDFTLTISSLQPEDF |
| | YLQMNSLRAEDTAVYYCARDLGAYN | ATYYCQQSYSTPLTFGQGTKVEIKRAD |
| | RPFYAFDYWGQGTLVTVSSAKTTAPS | AAPTVSIFPPSSEQLTSGGASVVCFLNN |
| | VYPLAPVCGDTTGSSVTLGCLVKGYFP | FYPKDINVKWKIDGSERQNGVLNSWT |
| | EPVTLTWNSGSLSSGVHTFPAVLQSDL | DQDSKDSTYSMSSTLTLTKDEYERHNS |
| | YTLSSSVTVTSSTWPSQSITCNVAHPAS | YTCEATHKTSTSPIVKSFNRNEC (SEQ |
| | STKVDKKIEPRGPTIKPCPPCKCPAPNL | ID NO: 733) |
| | LGGPSVFIFPPKIKDVLMISLSPIVTCVV | |
| | VDVSEDDPDVQISWFVNNVEVHTAQT | |
| | QTHREDYNSTLRVVSALPIQHQDWMS | |
| | GKEFKCKVNNKDLPAPIERTISKPKGS | |
| | VRAPQVYVLPPPEEEMTKKQVTLTCM | |
| | VTDFMPEDIYVEWTNNGKTELNYKNT | |
| | EPVLDSDGSYFMYSKLRVEKKNWVER | |
| | NSYSCSVVHEGLHNHHTTKSFSRTPGK | |
| | (SEQ ID NO: 732) | |
| I23RB28 | EVQLLESGGGLVQPGGSLRLSCAASGF | EIVLTQSPGTLSLSPGERATLSCRASQS |
| 0 | TFSNAAMHWVRQAPGKGLEWVSRID | VSSSYLAWYQQKPGQAPRLLIYGASSR |
| | GSGGYTEYADSVKGRFTISRDNSKNTL | ATGIPDRFSGSGSGTDFTLTISRLEPEDF |
| | YLQMNSLRAEDTAVYYCARELYSYLG | AVYYCQQYGSSPLTFGQGTKVEIKRA |
| | SSYYYGYFDYWGQGTLVTVSSAKTTA | DAAPTVSIFPPSSEQLTSGGASVVCFLN |
| | PSVYPLAPVCGDTTGSSVTLGCLVKGY | NFYPKDINVKWKIDGSERQNGVLNSW |
| | FPEPVTLTWNSGSLSSGVHTFPAVLQS | TDQDSKDSTYSMSSTLTLTKDEYERHN |
| | DLYTLSSSVTVTSSTWPSQSITCNVAHP | SYTCEATHKTSTSPIVKSFNRNEC (SEQ |
| | ASSTKVDKKIEPRGPTIKPCPPCKCPAP | ID NO: 735) |
| | NLLGGPSVFIFPPKIKDVLMISLSPIVTC | |
| | VVVDVSEDDPDVQISWFVNNVEVHTA | |
| | QTQTHREDYNSTLRVVSALPIQHQDW | |
| | MSGKEFKCKVNNKDLPAPIERTISKPK | |
| | GSVRAPQVYVLPPPEEEMTKKQVTLTC | |
| | MVTDFMPEDIYVEWTNNGKTELNYKN | |
| | TEPVLDSDGSYFMYSKLRVEKKNWVE | |
| | RNSYSCSVVHEGLHNHHTTKSFSRTPG | |
| | K (SEQ ID NO: 734) | |
| I23RB28 | EVQLLESGGGLVQPGGSLRLSCAASGF | DIQMTQSPSSLSASVGDRVTITCRASQS |
| 1 | TFSSYAMSWVRQAPGKGLEWVSAISG | ISSYLNWYQQKPGKAPKLLIYAASSLQ |
| | SGGSTYYADSVKGRFTISRDNSKNTLY | SGVPSRFSGSGSGTDFTLTISSLQPEDF |
| | LQMNSLRAEDTAVYYCARGPYYSGTS | ATYYCQQSYSTPLTFGQGTKVEIKRAD |
| | GYRSGGGFDYWGQGTLVTVSSAKTTA | AAPTVSIFPPSSEQLTSGGASVVCFLNN |
| | PSVYPLAPVCGDTTGSSVTLGCLVKGY | FYPKDINVKWKIDGSERQNGVLNSWT |
| | FPEPVTLTWNSGSLSSGVHTFPAVLQS | DQDSKDSTYSMSSTLTLTKDEYERHNS |
| | DLYTLSSSVTVTSSTWPSQSITCNVAHP | YTCEATHKTSTSPIVKSFNRNEC (SEQ |
| | ASSTKVDKKIEPRGPTIKPCPPCKCPAP | ID NO: 737) |
| | NLLGGPSVFIFPPKIKDVLMISLSPIVTC | |
| | VVVDVSEDDPDVQISWFVNNVEVHTA | |
| | QTQTHREDYNSTLRVVSALPIQHQDW | |
| | MSGKEFKCKVNNKDLPAPIERTISKPK | |
| | GSVRAPQVYVLPPPEEEMTKKQVTLTC | |
| | MVTDFMPEDIYVEWTNNGKTELNYKN | |
| | TEPVLDSDGSYFMYSKLRVEKKNWVE | |
| | RNSYSCSVVHEGLHNHHTTKSFSRTPG | |
| | K (SEQ ID NO: 736) | |
| I23RB28 | EVQLLESGGGLVQPGGSLRLSCAASGF | DIQMTQSPSSLSASVGDRVTITCRASQS |
| 2 | TFSNDAMNWVRQAPGKGLEWVSAID | ISSYLNWYQQKPGKAPKLLIYAASSLQ |
| | GNGGSTNYADSVKGRFTISRDNSKNTL | SGVPSRFSGSGSGTDFTLTISSLQPEDF |
| | YLQMNSLRAEDTAVYYCARDLGGYY | ATYYCQQSYSTPLTFGQGTKVEIKRAD |
| | GRRRRYYGMDVWGQGTLVTVSSAKT | AAPTVSIFPPSSEQLTSGGASVVCFLNN |
| | TAPSVYPLAPVCGDTTGSSVTLGCLVK | FYPKDINVKWKIDGSERQNGVLNSWT |
| | GYFPEPVTLTWNSGSLSSGVHTFPAVL | DQDSKDSTYSMSSTLTLTKDEYERHNS |
| | QSDLYTLSSSVTVTSSTWPSQSITCNVA | YTCEATHKTSTSPIVKSFNRNEC (SEQ |
| | HPASSTKVDKKIEPRGPTIKPCPPCKCP | ID NO: 739) |
| | APNLLGGPSVFIFPPKIKDVLMISLSPIV | |
| | TCVVVDVSEDDPDVQISWFVNNVEVH | |
| | TAQTQTHREDYNSTLRVVSALPIQHQD | |
| | WMSGKEFKCKVNNKDLPAPIERTISKP | |
| | KGSVRAPQVYVLPPPEEEMTKKQVTL | |
| | TCMVTDFMPEDIYVEWTNNGKTELNY | |
| | KNTEPVLDSDGSYFMYSKLRVEKKNW | |
| | VERNSYSCSVVHEGLHNHHTTKSFSRT | |
| | PGK (SEQ ID NO: 738) | |
| I23RB28 | EVQLLESGGGLVQPGGSLRLSCAAIGF | EIVLTQSPGTLSLSPGERATLSCRASQS |
| 3 | TFSSSAMHWVRQAPGKGLEWVSAIDG | VSSSYLAWYQQKPGQAPRLLIYGASSR |
| | EGGSTYYADSVKGRFTISRDNSKNTLY | ATGIPDRFSGSGSGTDFTLTISRLEPEDF |
| | LQMNSLRAEDTAVYYCAREVSSYGRY | AVYYCQQYGSSPLTFGQGTKVEIKRA |
| | GFGYWGQGTLVTVSSAKTTAPSVYPL | DAAPTVSIFPPSSEQLTSGGASVVCFLN |
| | APVCGDTTGSSVTLGCLVKGYFPEPVT | NFYPKDINVKWKIDGSERQNGVLNSW |
| | LTWNSGSLSSGVHTFPAVLQSDLYTLS | TDQDSKDSTYSMSSTLTLTKDEYERHN |
| | SSVTVTSSTWPSQSITCNVAHPASSTKV | SYTCEATHKTSTSPIVKSFNRNEC (SEQ |
| | DKKIEPRGPTIKPCPPCKCPAPNLLGGP | ID NO: 741) |
| | SVFIFPPKIKDVLMISLSPIVTCVVVDVS | |
| | EDDPDVQISWFVNNVEVHTAQTQTHR | |
| | EDYNSTLRVVSALPIQHQDWMSGKEF | |
| | KCKVNNKDLPAPIERTISKPKGSVRAP | |
| | QVYVLPPPEEEMTKKQVTLTCMVTDF | |
| | MPEDIYVEWTNNGKTELNYKNTEPVL | |
| | DSDGSYFMYSKLRVEKKNWVERNSYS | |
| | CSVVHEGLHNHHTTKSFSRTPGK (SEQ | |
| | ID NO: 740) | |
| I23RB28 | EVQLLESGGGLVQPGGSLRLSCAASGF | DIQMTQSPSSLSASVGDRVTITCRASQS |
| 4 | TFSSYAMSWVRQAPGKGLEWVSAISG | ISSYLNWYQQKPGKAPKLLIYAASSLQ |
| | SGGSTYYADSVKGRFTISRDNSKNTLY | SGVPSRFSGSGSGTDFTLTISSLQPEDF |
| | LQMNSLRAEDTAVYYCARGLAGNSSG | ATYYCQQSYSTPLTFGQGTKVEIKRAD |
| | GGFDYWGQGTLVTVSSAKTTAPSVYP | AAPTVSIFPPSSEQLTSGGASVVCFLNN |
| | LAPVCGDTTGSSVTLGCLVKGYFPEPV | FYPKDINVKWKIDGSERQNGVLNSWT |
| | TLTWNSGSLSSGVHTFPAVLQSDLYTL | DQDSKDSTYSMSSTLTLTKDEYERHNS |
| | SSSVTVTSSTWPSQSITCNVAHPASSTK | YTCEATHKTSTSPIVKSFNRNEC (SEQ |
| | VDKKIEPRGPTIKPCPPCKCPAPNLLGG | ID NO: 743) |
| | PSVFIFPPKIKDVLMISLSPIVTCVVVDV | |
| | SEDDPDVQISWFVNNVEVHTAQTQTH | |
| | REDYNSTLRVVSALPIQHQDWMSGKE | |
| | FKCKVNNKDLPAPIERTISKPKGSVRAP | |
| | QVYVLPPPEEEMTKKQVTLTCMVTDF | |
| | MPEDIYVEWTNNGKTELNYKNTEPVL | |
| | DSDGSYFMYSKLRVEKKNWVERNSYS | |
| | CSVVHEGLHNHHTTKSFSRTPGK (SEQ | |
| | ID NO: 742) | |
| I23RB28 | EVQLLESGGGLVQPGGSLRLSCAASGF | DIQMTQSPSSLSASVGDRVTITCRASQS |
| 5 | TFDDYAMNWVRQAPGKGLEWVSAIA | ISSYLNWYQQKPGKAPKLLIYAASSLQ |
| | GNGGSTEYADSVKGRFTISRDNSKNTL | SGVPSRFSGSGSGTDFTLTISSLQPEDF |
| | YLQMNSLRAEDTAVYYCARDGGYPLT | ATYYCQQSYSTPLTFGQGTKVEIKRAD |
| | AVTGIYFDYWGQGTLVTVSSAKTTAPS | AAPTVSIFPPSSEQLTSGGASVVCFLNN |
| | VYPLAPVCGDTTGSSVTLGCLVKGYFP | FYPKDINVKWKIDGSERQNGVLNSWT |
| | EPVTLTWNSGSLSSGVHTFPAVLQSDL | DQDSKDSTYSMSSTLTLTKDEYERHNS |
| | YTLSSSVTVTSSTWPSQSITCNVAHPAS | YTCEATHKTSTSPIVKSFNRNEC (SEQ |
| | STKVDKKIEPRGPTIKPCPPCKCPAPNL | ID NO: 745) |
| | LGGPSVFIFPPKIKDVLMISLSPIVTCVV | |
| | VDVSEDDPDVQISWFVNNVEVHTAQT | |
| | QTHREDYNSTLRVVSALPIQHQDWMS | |
| | GKEFKCKVNNKDLPAPIERTISKPKGS | |
| | VRAPQVYVLPPPEEEMTKKQVTLTCM | |
| | VTDFMPEDIYVEWTNNGKTELNYKNT | |
| | EPVLDSDGSYFMYSKLRVEKKNWVER | |
| | NSYSCSVVHEGLHNHHTTKSFSRTPGK | |
| | (SEQ ID NO: 744) | |
| I23RB28 | EVQLLESGGGLVQPGGSLRLSCAASGF | DIQMTQSPSSLSASVGDRVTITCRASQS |
| 6 | TFSDAGMSWVRQAPGKGLEWVSAISG | ISSYLNWYQQKPGKAPKLLIYAASSLQ |
| | NGGSTNYADSVKGRFTISRDNSKNTLY | SGVPSRFSGSGSGTDFTLTISSLQPEDF |
| | LQMNSLRAEDTAVYYCARRRRRASFD | ATYYCQQSYSTPLTFGQGTKVEIKRAD |
| | YWGQGTLVTVSSAKTTAPSVYPLAPV | AAPTVSIFPPSSEQLTSGGASVVCFLNN |
| | CGDTTGSSVTLGCLVKGYFPEPVTLTW | FYPKDINVKWKIDGSERQNGVLNSWT |
| | NSGSLSSGVHTFPAVLQSDLYTLSSSVT | DQDSKDSTYSMSSTLTLTKDEYERHNS |
| | VTSSTWPSQSITCNVAHPASSTKVDKKI | YTCEATHKTSTSPIVKSFNRNEC (SEQ |
| | EPRGPTIKPCPPCKCPAPNLLGGPSVFIF | ID NO: 747) |
| | PPKIKDVLMISLSPIVTCVVVDVSEDDP | |
| | DVQISWFVNNVEVHTAQTQTHREDYN | |
| | STLRVVSALPIQHQDWMSGKEFKCKV | |
| | NNKDLPAPIERTISKPKGSVRAPQVYV | |
| | LPPPEEEMTKKQVTLTCMVTDFMPEDI | |
| | YVEWTNNGKTELNYKNTEPVLDSDGS | |
| | YFMYSKLRVEKKNWVERNSYSCSVVH | |
| | EGLHNHHTTKSFSRTPGK (SEQ ID | |
| | NO: 746) | |
| I23RB28 | EVQLVQSGAEVKKPGESLKISCKGSGY | EIVLTQSPGTLSLSPGERATLSCRASQS |
| 7 | SFTDAAIHWVRQMPGKGLEWMGTIDP | VSSSYLAWYQQKPGQAPRLLIYGASSR |
| | GDSTTRYSPSFQGQVTISADKSISTAYL | ATGIPDRFSGSGSGTDFTLTISRLEPEDF |
| | QWSSLKASDTAVYYCARDLYYTLEYN | AVYYCQQYGSSPLTFGQGTKVEIKRA |
| | WYYDAFDYWGQGTLVTVSSAKTTAPS | DAAPTVSIFPPSSEQLTSGGASVVCFLN |
| | VYPLAPVCGDTTGSSVTLGCLVKGYFP | NFYPKDINVKWKIDGSERQNGVLNSW |
| | EPVTLTWNSGSLSSGVHTFPAVLQSDL | TDQDSKDSTYSMSSTLTLTKDEYERHN |
| | YTLSSSVTVTSSTWPSQSITCNVAHPAS | SYTCEATHKTSTSPIVKSFNRNEC (SEQ |
| | STKVDKKIEPRGPTIKPCPPCKCPAPNL | ID NO: 749) |
| | LGGPSVFIFPPKIKDVLMISLSPIVTCVV | |
| | VDVSEDDPDVQISWFVNNVEVHTAQT | |
| | QTHREDYNSTLRVVSALPIQHQDWMS | |
| | GKEFKCKVNNKDLPAPIERTISKPKGS | |
| | VRAPQVYVLPPPEEEMTKKQVTLTCM | |
| | VTDFMPEDIYVEWTNNGKTELNYKNT | |
| | EPVLDSDGSYFMYSKLRVEKKNWVER | |
| | NSYSCSVVHEGLHNHHTTKSFSRTPGK | |
| | (SEQ ID NO: 748) | |
| I23RB28 | EVQLVQSGAEVKKPGESLKISCKGSGY | EIVLTQSPGTLSLSPGERATLSCRASQS |
| 8 | SFKSDWISWVRQMPGKGLEWMGWIY | VSSSYLAWYQQKPGQAPRLLIYGASSR |
| | PGDSRTYYSPSFQGQVTISADKSISTAY | ATGIPDRFSGSGSGTDFTLTISRLEPEDF |
| | LQWSSLKASDTAVYYCARDSSYGTGN | AVYYCQQYGSSPLTFGQGTKVEIKRA |
| | RGGRSGAFDYWGQGTLVTVSSAKTTA | DAAPTVSIFPPSSEQLTSGGASVVCFLN |
| | PSVYPLAPVCGDTTGSSVTLGCLVKGY | NFYPKDINVKWKIDGSERQNGVLNSW |
| | FPEPVTLTWNSGSLSSGVHTFPAVLQS | TDQDSKDSTYSMSSTLTLTKDEYERHN |
| | DLYTLSSSVTVTSSTWPSQSITCNVAHP | SYTCEATHKTSTSPIVKSFNRNEC (SEQ |
| | ASSTKVDKKIEPRGPTIKPCPPCKCPAP | ID NO: 751) |
| | NLLGGPSVFIFPPKIKDVLMISLSPIVTC | |
| | VVVDVSEDDPDVQISWFVNNVEVHTA | |
| | QTQTHREDYNSTLRVVSALPIQHQDW | |
| | MSGKEFKCKVNNKDLPAPIERTISKPK | |
| | GSVRAPQVYVLPPPEEEMTKKQVTLTC | |
| | MVTDFMPEDIYVEWTNNGKTELNYKN | |
| | TEPVLDSDGSYFMYSKLRVEKKNWVE | |
| | RNSYSCSVVHEGLHNHHTTKSFSRTPG | |
| | K (SEQ ID NO: 750) | |
| I23RB28 | EVQLVQSGAEVKKPGESLKISCKGSGY | DIQMTQSPSSLSASVGDRVTITCRASQS |
| 9 | SFDSAGINWVRQMPGKGLEWMGNIYP | ISSYLNWYQQKPGKAPKLLIYAASSLQ |
| | GDSDTRYSPSFQGQVTISADKSISTAYL | SGVPSRFSGSGSGTDFTLTISSLQPEDF |
| | QWSSLKASDTAVYYCARGGGSLGFDY | ATYYCQQSYSTPLTFGQGTKVEIKRAD |
| | WGQGTLVTVSSAKTTAPSVYPLAPVC | AAPTVSIFPPSSEQLTSGGASVVCFLNN |
| | GDTTGSSVTLGCLVKGYFPEPVTLTWN | FYPKDINVKWKIDGSERQNGVLNSWT |
| | SGSLSSGVHTFPAVLQSDLYTLSSSVTV | DQDSKDSTYSMSSTLTLTKDEYERHNS |
| | TSSTWPSQSITCNVAHPASSTKVDKKIE | YTCEATHKTSTSPIVKSFNRNEC (SEQ |
| | PRGPTIKPCPPCKCPAPNLLGGPSVFIFP | ID NO: 753) |
| | PKIKDVLMISLSPIVTCVVVDVSEDDPD | |
| | VQISWFVNNVEVHTAQTQTHREDYNS | |
| | TLRVVSALPIQHQDWMSGKEFKCKVN | |
| | NKDLPAPIERTISKPKGSVRAPQVYVLP | |
| | PPEEEMTKKQVTLTCMVTDFMPEDIY | |
| | VEWTNNGKTELNYKNTEPVLDSDGSY | |
| | FMYSKLRVEKKNWVERNSYSCSVVHE | |
| | GLHNHHTTKSFSRTPGK (SEQ ID | |
| | NO: 752) | |
| I23RB29 | EVQLVQSGAEVKKPGESLKISCKGSGY | DIQMTQSPSSLSASVGDRVTITCRASQS |
| 0 | SFKNDGIHWVRQMPGKGLEWMGWIA | ISSYLNWYQQKPGKAPKLLIYAASSLQ |
| | PGESTTGYSPSFQGQVTISADKSISTAY | SGVPSRFSGSGSGTDFTLTISSLQPEDF |
| | LQWSSLKASDTAVYYCARDLGGYGSA | ATYYCQQSYSTPLTFGQGTKVEIKRAD |
| | SGRRSDYFDYWGQGTLVTVSSAKTTA | AAPTVSIFPPSSEQLTSGGASVVCFLNN |
| | PSVYPLAPVCGDTTGSSVTLGCLVKGY | FYPKDINVKWKIDGSERQNGVLNSWT |
| | FPEPVTLTWNSGSLSSGVHTFPAVLQS | DQDSKDSTYSMSSTLTLTKDEYERHNS |
| | DLYTLSSSVTVTSSTWPSQSITCNVAHP | YTCEATHKTSTSPIVKSFNRNEC (SEQ |
| | ASSTKVDKKIEPRGPTIKPCPPCKCPAP | ID NO: 755) |
| | NLLGGPSVFIFPPKIKDVLMISLSPIVTC | |
| | VVVDVSEDDPDVQISWFVNNVEVHTA | |
| | QTQTHREDYNSTLRVVSALPIQHQDW | |
| | MSGKEFKCKVNNKDLPAPIERTISKPK | |
| | GSVRAPQVYVLPPPEEEMTKKQVTLTC | |
| | MVTDFMPEDIYVEWTNNGKTELNYKN | |
| | TEPVLDSDGSYFMYSKLRVEKKNWVE | |
| | RNSYSCSVVHEGLHNHHTTKSFSRTPG | |
| | K (SEQ ID NO: 754) | |
| I23RB29 | EVQLVQSGAEVKKPGESLKISCKGSGY | EIVLTQSPATLSLSPGERATLSCRASQS |
| 1 | SFTSYYISWVRQMPGKGLEWMGNIYP | VSSYLAWYQQKPGQAPRLLIYDASNR |
| | GDSRTRYSPSFQGQVTISADKSISTAYL | ATGIPARFSGSGSGTDFTLTISSLEPEDF |
| | QWSSLKASDTAVYYCARDRYYGIPFD | AVYYCQQRSNWPLTFGQGTKVEIKRA |
| | YWGQGTLVTVSSAKTTAPSVYPLAPV | DAAPTVSIFPPSSEQLTSGGASVVCFLN |
| | CGDTTGSSVTLGCLVKGYFPEPVTLTW | NFYPKDINVKWKIDGSERQNGVLNSW |
| | NSGSLSSGVHTFPAVLQSDLYTLSSSVT | TDQDSKDSTYSMSSTLTLTKDEYERHN |
| | VTSSTWPSQSITCNVAHPASSTKVDKKI | SYTCEATHKTSTSPIVKSFNRNEC (SEQ |
| | EPRGPTIKPCPPCKCPAPNLLGGPSVFIF | ID NO: 757) |
| | PPKIKDVLMISLSPIVTCVVVDVSEDDP | |
| | DVQISWFVNNVEVHTAQTQTHREDYN | |
| | STLRVVSALPIQHQDWMSGKEFKCKV | |
| | NNKDLPAPIERTISKPKGSVRAPQVYV | |
| | LPPPEEEMTKKQVTLTCMVTDFMPEDI | |
| | YVEWTNNGKTELNYKNTEPVLDSDGS | |
| | YFMYSKLRVEKKNWVERNSYSCSVVH | |
| | EGLHNHHTTKSFSRTPGK (SEQ ID | |
| | NO: 756) | |
| I23RB29 | EVQLVQSGAEVKKPGESLKISCKGSGY | DIQMTQSPSSLSASVGDRVTITCRASQS |
| 2 | SFDTDYINWVRQMPGKGLEWMGYILP | ISSYLNWYQQKPGKAPKLLIYAASSLQ |
| | GESDTRYSPSFQGQVTISADKSISTAYL | SGVPSRFSGSGSGTDFTLTISSLQPEDF |
| | QWSSLKASDTAVYYCARGGGYGLVN | ATYYCQQSYSTPLTFGQGTKVEIKRAD |
| | RRRRSYAFDYWGQGTLVTVSSAKTTA | AAPTVSIFPPSSEQLTSGGASVVCFLNN |
| | PSVYPLAPVCGDTTGSSVTLGCLVKGY | FYPKDINVKWKIDGSERQNGVLNSWT |
| | FPEPVTLTWNSGSLSSGVHTFPAVLQS | DQDSKDSTYSMSSTLTLTKDEYERHNS |
| | DLYTLSSSVTVTSSTWPSQSITCNVAHP | YTCEATHKTSTSPIVKSFNRNEC (SEQ |
| | ASSTKVDKKIEPRGPTIKPCPPCKCPAP | ID NO: 759) |
| | NLLGGPSVFIFPPKIKDVLMISLSPIVTC | |
| | VVVDVSEDDPDVQISWFVNNVEVHTA | |
| | QTQTHREDYNSTLRVVSALPIQHQDW | |
| | MSGKEFKCKVNNKDLPAPIERTISKPK | |
| | GSVRAPQVYVLPPPEEEMTKKQVTLTC | |
| | MVTDFMPEDIYVEWTNNGKTELNYKN | |
| | TEPVLDSDGSYFMYSKLRVEKKNWVE | |
| | RNSYSCSVVHEGLHNHHTTKSFSRTPG | |
| | K (SEQ ID NO: 758) | |
| I23RB31 | QVQLVQSGAEVKKPGSSVKVSCKASG | DIQMTQSPSSLSASVGDRVTITCRASQS |
| 3 | GTFSSYGISWVRQAPGQGLEWMGWIS | IGEDLNWYQQKPGKAPKLLIYAASSLQ |
| | AIFGTTNYAQKFQGRVTITADESTSTA | SGVPSRFSGSGSGTDFTLTISSLQPEDF |
| | YMELSSLRSEDTAVYYCARGTVPGFD | ATYYCQQSYSTPLTFGQGTKVEIKRAD |
| | YWGQGTLVTVSSAKTTAPSVYPLAPV | AAPTVSIFPPSSEQLTSGGASVVCFLNN |
| | CGDTTGSSVTLGCLVKGYFPEPVTLTW | FYPKDINVKWKIDGSERQNGVLNSWT |
| | NSGSLSSGVHTFPAVLQSDLYTLSSSVT | DQDSKDSTYSMSSTLTLTKDEYERHNS |
| | VTSSTWPSQSITCNVAHPASSTKVDKKI | YTCEATHKTSTSPIVKSFNRNEC (SEQ |
| | EPRGPTIKPCPPCKCPAPNLLGGPSVFIF | ID NO: 761) |
| | PPKIKDVLMISLSPIVTCVVVDVSEDDP | |
| | DVQISWFVNNVEVHTAQTQTHREDYN | |
| | STLRVVSALPIQHQDWMSGKEFKCKV | |
| | NNKDLPAPIERTISKPKGSVRAPQVYV | |
| | LPPPEEEMTKKQVTLTCMVTDFMPEDI | |
| | YVEWTNNGKTELNYKNTEPVLDSDGS | |
| | YFMYSKLRVEKKNWVERNSYSCSVVH | |
| | EGLHNHHTTKSFSRTPGK (SEQ ID | |
| | NO: 760) | |
| I23RB31 | QVQLVQSGAEVKKPGSSVKVSCKASG | DIQMTQSPSSLSASVGDRVTITCRASQS |
| 4 | GTFSSYGISWVRQAPGQGLEWMGWIS | ISEDLNWYQQKPGKAPKLLIYAASSLQ |
| | PIFGTANYAQKFQGRVTITADESTSTA | SGVPSRFSGSGSGTDFTLTISSLQPEDF |
| | YMELSSLRSEDTAVYYCARMMMQGF | ATYYCQQSYSTPLTFGQGTKVEIKRAD |
| | DYWGQGTLVTVSSAKTTAPSVYPLAP | AAPTVSIFPPSSEQLTSGGASVVCFLNN |
| | VCGDTTGSSVTLGCLVKGYFPEPVTLT | FYPKDINVKWKIDGSERQNGVLNSWT |
| | WNSGSLSSGVHTFPAVLQSDLYTLSSS | DQDSKDSTYSMSSTLTLTKDEYERHNS |
| | VTVTSSTWPSQSITCNVAHPASSTKVD | YTCEATHKTSTSPIVKSFNRNEC (SEQ |
| | KKIEPRGPTIKPCPPCKCPAPNLLGGPS | ID NO: 763) |
| | VFIFPPKIKDVLMISLSPIVTCVVVDVSE | |
| | DDPDVQISWFVNNVEVHTAQTQTHRE | |
| | DYNSTLRVVSALPIQHQDWMSGKEFK | |
| | CKVNNKDLPAPIERTISKPKGSVRAPQ | |
| | VYVLPPPEEEMTKKQVTLTCMVTDFM | |
| | PEDIYVEWTNNGKTELNYKNTEPVLDS | |
| | DGSYFMYSKLRVEKKNWVERNSYSCS | |
| | VVHEGLHNHHTTKSFSRTPGK (SEQ ID | |
| | NO: 762) | |
| I23RB31 | QVQLVQSGAEVKKPGSSVKVSCKASG | EIVLTQSPATLSLSPGERATLSCRASQS |
| 5 | DTFSSYAISWVRQAPGQGLEWMGWIS | VRKWLAWYQQKPGQAPRLLIYAASN |
| | AIFGNANYAQKFQGRVTITADESTSTA | RATGIPARFSGSGSGTDFTLTISSLEPED |
| | YMELSSLRSEDTAVYYCARGAGWTLL | FAVYYCQQYNNAPLTFGQGTKVEIKR |
| | LDYWGQGTLVTVSSAKTTAPSVYPLA | ADAAPTVSIFPPSSEQLTSGGASVVCFL |
| | PVCGDTTGSSVTLGCLVKGYFPEPVTL | NNFYPKDINVKWKIDGSERQNGVLNS |
| | TWNSGSLSSGVHTFPAVLQSDLYTLSS | WTDQDSKDSTYSMSSTLTLTKDEYER |
| | SVTVTSSTWPSQSITCNVAHPASSTKV | HNSYTCEATHKTSTSPIVKSFNRNEC |
| | DKKIEPRGPTIKPCPPCKCPAPNLLGGP | (SEQ ID NO: 765) |
| | SVFIFPPKIKDVLMISLSPIVTCVVVDVS | |
| | EDDPDVQISWFVNNVEVHTAQTQTHR | |
| | EDYNSTLRVVSALPIQHQDWMSGKEF | |
| | KCKVNNKDLPAPIERTISKPKGSVRAP | |
| | QVYVLPPPEEEMTKKQVTLTCMVTDF | |
| | MPEDIYVEWTNNGKTELNYKNTEPVL | |
| | DSDGSYFMYSKLRVEKKNWVERNSYS | |
| | CSVVHEGLHNHHTTKSFSRTPGK (SEQ | |
| | ID NO: 764) | |
| I23RB31 | QVQLVQSGAEVKKPGSSVKVSCKASG | DIQMTQSPSSLSASVGDRVTITCRASQS |
| 6 | GTFSSYGISWVRQAPGQGLEWMGWIIP | ISNDLNWYQQKPGKAPKLLIYAASSLQ |
| | IFGTTNYAQKFQGRVTITADESTSTAY | SGVPSRFSGSGSGTDFTLTISSLQPEDF |
| | MELSSLRSEDTAVYYCARMMMQSLD | ATYYCQQSYSTPLTFGQGTKVEIKRAD |
| | YWGQGTLVTVSSAKTTAPSVYPLAPV | AAPTVSIFPPSSEQLTSGGASVVCFLNN |
| | CGDTTGSSVTLGCLVKGYFPEPVTLTW | FYPKDINVKWKIDGSERQNGVLNSWT |
| | NSGSLSSGVHTFPAVLQSDLYTLSSSVT | DQDSKDSTYSMSSTLTLTKDEYERHNS |
| | VTSSTWPSQSITCNVAHPASSTKVDKKI | YTCEATHKTSTSPIVKSFNRNEC (SEQ |
| | EPRGPTIKPCPPCKCPAPNLLGGPSVFIF | ID NO: 767) |
| | PPKIKDVLMISLSPIVTCVVVDVSEDDP | |
| | DVQISWFVNNVEVHTAQTQTHREDYN | |
| | STLRVVSALPIQHQDWMSGKEFKCKV | |
| | NNKDLPAPIERTISKPKGSVRAPQVYV | |
| | LPPPEEEMTKKQVTLTCMVTDFMPEDI | |
| | YVEWTNNGKTELNYKNTEPVLDSDGS | |
| | YFMYSKLRVEKKNWVERNSYSCSVVH | |
| | EGLHNHHTTKSFSRTPGK (SEQ ID | |
| | NO: 766) | |
| I23RB31 | QVQLVQSGAEVKKPGSSVKVSCKASG | EIVLTQSPATLSLSPGERATLSCRASQS |
| 7 | GTFSSYAISWVRQAPGQGLEWMGGIIP | VDSFLAWYQQKPGQAPRLLIYTASNR |
| | IFGTANYAQKFQGRVTITADESTSTAY | ATGIPARFSGSGSGTDFTLTISSLEPEDF |
| | MELSSLRSEDTAVYYCARGNGVNYHS | AVYYCQQGNSAPFTFGQGTKVEIKRA |
| | ELDYWGQGTLVTVSSAKTTAPSVYPL | DAAPTVSIFPPSSEQLTSGGASVVCFLN |
| | APVCGDTTGSSVTLGCLVKGYFPEPVT | NFYPKDINVKWKIDGSERQNGVLNSW |
| | LTWNSGSLSSGVHTFPAVLQSDLYTLS | TDQDSKDSTYSMSSTLTLTKDEYERHN |
| | SSVTVTSSTWPSQSITCNVAHPASSTKV | SYTCEATHKTSTSPIVKSFNRNEC (SEQ |
| | DKKIEPRGPTIKPCPPCKCPAPNLLGGP | ID NO: 769) |
| | SVFIFPPKIKDVLMISLSPIVTCVVVDVS | |
| | EDDPDVQISWFVNNVEVHTAQTQTHR | |
| | EDYNSTLRVVSALPIQHQDWMSGKEF | |
| | KCKVNNKDLPAPIERTISKPKGSVRAP | |
| | QVYVLPPPEEEMTKKQVTLTCMVTDF | |
| | MPEDIYVEWTNNGKTELNYKNTEPVL | |
| | DSDGSYFMYSKLRVEKKNWVERNSYS | |
| | CSVVHEGLHNHHTTKSFSRTPGK (SEQ | |
| | ID NO: 768) | |
| I23RB31 | QVQLVQSGAEVKKPGSSVKVSCKASG | DIQMTQSPSSLSASVGDRVTITCRASQS |
| 8 | GTFSSYAISWVRQAPGQGLEWMGGIIP | IDRWLNWYQQKPGKAPKLLIYYASSL |
| | IFGTANYAQKFQGRVTITADESTSTAY | QSGVPSRFSGSGSGTDFTLTISSLQPED |
| | MELSSLRSEDTAVYYCARVRARHRGS | FATYYCQQSYSTPLTFGQGTKVEIKRA |
| | FDYWGQGTLVTVSSAKTTAPSVYPLA | DAAPTVSIFPPSSEQLTSGGASVVCFLN |
| | PVCGDTTGSSVTLGCLVKGYFPEPVTL | NFYPKDINVKWKIDGSERQNGVLNSW |
| | TWNSGSLSSGVHTFPAVLQSDLYTLSS | TDQDSKDSTYSMSSTLTLTKDEYERHN |
| | SVTVTSSTWPSQSITCNVAHPASSTKV | SYTCEATHKTSTSPIVKSFNRNEC (SEQ |
| | DKKIEPRGPTIKPCPPCKCPAPNLLGGP | ID NO: 771) |
| | SVFIFPPKIKDVLMISLSPIVTCVVVDVS | |
| | EDDPDVQISWFVNNVEVHTAQTQTHR | |
| | EDYNSTLRVVSALPIQHQDWMSGKEF | |
| | KCKVNNKDLPAPIERTISKPKGSVRAP | |
| | QVYVLPPPEEEMTKKQVTLTCMVTDF | |
| | MPEDIYVEWTNNGKTELNYKNTEPVL | |
| | DSDGSYFMYSKLRVEKKNWVERNSYS | |
| | CSVVHEGLHNHHTTKSFSRTPGK (SEQ | |
| | ID NO: 770) | |
| I23RB31 | QVQLVQSGAEVKKPGSSVKVSCKASG | DIQMTQSPSSLSASVGDRVTITCRASQS |
| 9 | GTFSSYGISWVRQAPGQGLEWMGWIS | ITDDLNWYQQKPGKAPKLLIYAASSLQ |
| | AIFGTTNYAQKFQGRVTITADESTSTA | SGVPSRFSGSGSGTDFTLTISSLQPEDF |
| | YMELSSLRSEDTALYYCARPLKQAFD | ATYYCQQSYSTPLTFGQGTKVEIKRAD |
| | YWGQGTLVTVSSAKTTAPSVYPLAPV | AAPTVSIFPPSSEQLTSGGASVVCFLNN |
| | CGDTTGSSVTLGCLVKGYFPEPVTLTW | FYPKDINVKWKIDGSERQNGVLNSWT |
| | NSGSLSSGVHTFPAVLQSDLYTLSSSVT | DQDSKDSTYSMSSTLTLTKDEYERHNS |
| | VTSSTWPSQSITCNVAHPASSTKVDKKI | YTCEATHKTSTSPIVKSFNRNEC (SEQ |
| | EPRGPTIKPCPPCKCPAPNLLGGPSVFIF | ID NO: 773) |
| | PPKIKDVLMISLSPIVTCVVVDVSEDDP | |
| | DVQISWFVNNVEVHTAQTQTHREDYN | |
| | STLRVVSALPIQHQDWMSGKEFKCKV | |
| | NNKDLPAPIERTISKPKGSVRAPQVYV | |
| | LPPPEEEMTKKQVTLTCMVTDFMPEDI | |
| | YVEWTNNGKTELNYKNTEPVLDSDGS | |
| | YFMYSKLRVEKKNWVERNSYSCSVVH | |
| | EGLHNHHTTKSFSRTPGK (SEQ ID | |
| | NO: 772) | |
| I23RB32 | QVQLVQSGAEVKKPGSSVKVSCKASG | DIQMTQSPSSLSASVGDRVTITCRASQS |
| 0 | GTFSSYGISWVRQAPGQGLEWMGWIS | ITSDLNWYQQKPGKAPKLLIYAASSLQ |
| | AIFGTTNYAQKFQGRVTITADESTSTA | SGVPSRFSGSGSGTDFTLTISSLQPEDF |
| | YMELSSLRSEDTAVYYCARNGTGNSF | ATYYCQQSYSTPLTFGQGTKVEIKRAD |
| | DYWGQGTLVTVSSAKTTAPSVYPLAP | AAPTVSIFPPSSEQLTSGGASVVCFLNN |
| | VCGDTTGSSVTLGCLVKGYFPEPVTLT | FYPKDINVKWKIDGSERQNGVLNSWT |
| | WNSGSLSSGVHTFPAVLQSDLYTLSSS | DQDSKDSTYSMSSTLTLTKDEYERHNS |
| | VTVTSSTWPSQSITCNVAHPASSTKVD | YTCEATHKTSTSPIVKSFNRNEC (SEQ |
| | KKIEPRGPTIKPCPPCKCPAPNLLGGPS | ID NO: 775) |
| | VFIFPPKIKDVLMISLSPIVTCVVVDVSE | |
| | DDPDVQISWFVNNVEVHTAQTQTHRE | |
| | DYNSTLRVVSALPIQHQDWMSGKEFK | |
| | CKVNNKDLPAPIERTISKPKGSVRAPQ | |
| | VYVLPPPEEEMTKKQVTLTCMVTDFM | |
| | PEDIYVEWTNNGKTELNYKNTEPVLDS | |
| | DGSYFMYSKLRVEKKNWVERNSYSCS | |
| | VVHEGLHNHHTTKSFSRTPGK (SEQ ID | |
| | NO: 774) | |
| I23RB32 | QVQLVQSGAEVKKPGSSVKVSCKASG | DIQMTQSPSSLSASVGDRVTITCRASQS |
| 1 | GTFSSYGISWVRQAPGQGLEWMGWIS | IGGDLNWYQQKPGKAPKLLIYAASSL |
| | AIFGTTNYAQKFQGRVTITADESTSTA | QSGVPSRFSGSGSGTDFTLTISSLQPED |
| | YMELSSLRSEDTAVYYCARHWLQSFD | FATYYCQQSYSTPLTFGQGTKVEIKRA |
| | YWGQGTLVTVSSAKTTAPSVYPLAPV | DAAPTVSIFPPSSEQLTSGGASVVCFLN |
| | CGDTTGSSVTLGCLVKGYFPEPVTLTW | NFYPKDINVKWKIDGSERQNGVLNSW |
| | NSGSLSSGVHTFPAVLQSDLYTLSSSVT | TDQDSKDSTYSMSSTLTLTKDEYERHN |
| | VTSSTWPSQSITCNVAHPASSTKVDKKI | SYTCEATHKTSTSPIVKSFNRNEC (SEQ |
| | EPRGPTIKPCPPCKCPAPNLLGGPSVFIF | ID NO: 777) |
| | PPKIKDVLMISLSPIVTCVVVDVSEDDP | |
| | DVQISWFVNNVEVHTAQTQTHREDYN | |
| | STLRVVSALPIQHQDWMSGKEFKCKV | |
| | NNKDLPAPIERTISKPKGSVRAPQVYV | |
| | LPPPEEEMTKKQVTLTCMVTDFMPEDI | |
| | YVEWTNNGKTELNYKNTEPVLDSDGS | |
| | YFMYSKLRVEKKNWVERNSYSCSVVH | |
| | EGLHNHHTTKSFSRTPGK (SEQ ID | |
| | NO: 776) | |
| I23RB32 | QVQLVQSGAEVKKPGSSVKVSCKASG | EIVLTQSPATLSLSPGERATLSCRASQS |
| 8 | GTFSSYAISWVRQAPGQGLEWMGGIIP | VSSYLAWYQQKPGQAPRLLIYDASNR |
| | IFGTANYAQKFQGRVTITADESTSTAY | ATGVPARFSGSGTGTDFTLTISSLQPED |
| | MELSSLRSEDTAVYYCARGRYIRSYDY | VAVYYCQQRNSTPLTFGQGTKVEIKR |
| | FDYWGQGTLVTVSSAKTTAPSVYPLA | ADAAPTVSIFPPSSEQLTSGGASVVCFL |
| | PVCGDTTGSSVTLGCLVKGYFPEPVTL | NNFYPKDINVKWKIDGSERQNGVLNS |
| | TWNSGSLSSGVHTFPAVLQSDLYTLSS | WTDQDSKDSTYSMSSTLTLTKDEYER |
| | SVTVTSSTWPSQSITCNVAHPASSTKV | HNSYTCEATHKTSTSPIVKSFNRNEC |
| | DKKIEPRGPTIKPCPPCKCPAPNLLGGP | (SEQ ID NO: 779) |
| | SVFIFPPKIKDVLMISLSPIVTCVVVDVS | |
| | EDDPDVQISWFVNNVEVHTAQTQTHR | |
| | EDYNSTLRVVSALPIQHQDWMSGKEF | |
| | KCKVNNKDLPAPIERTISKPKGSVRAP | |
| | QVYVLPPPEEEMTKKQVTLTCMVTDF | |
| | MPEDIYVEWTNNGKTELNYKNTEPVL | |
| | DSDGSYFMYSKLRVEKKNWVERNSYS | |
| | CSVVHEGLHNHHTTKSFSRTPGK (SEQ | |
| | ID NO: 778) | |
| I23RB32 | QVQLVQSGAEVKKPGSSVKVSCKASG | EIVLTQSPATLSLSPGERATLSCRASQS |
| 9 | GTFSSYAISWVRQAPGQGLEWMGGIIP | VSSYLAWYQQKPGQAPRLLIYDASNR |
| | IFGTANYAQKFQGRVTITADESTSTAY | ATGIPARFSGTGSGTDFTLTISSLEPEDF |
| | MELSSLRSEDTAVYYCARDSYYSTVT | ATYYCQQRSNTPLTFGQGTKVEIKRAD |
| | YYYFDYWGQGTLVTVSSAKTTAPSVY | AAPTVSIFPPSSEQLTSGGASVVCFLNN |
| | PLAPVCGDTTGSSVTLGCLVKGYFPEP | FYPKDINVKWKIDGSERQNGVLNSWT |
| | VTLTWNSGSLSSGVHTFPAVLQSDLYT | DQDSKDSTYSMSSTLTLTKDEYERHNS |
| | LSSSVTVTSSTWPSQSITCNVAHPASST | YTCEATHKTSTSPIVKSFNRNEC (SEQ |
| | KVDKKIEPRGPTIKPCPPCKCPAPNLLG | ID NO: 781) |
| | GPSVFIFPPKIKDVLMISLSPIVTCVVVD | |
| | VSEDDPDVQISWFVNNVEVHTAQTQT | |
| | HREDYNSTLRVVSALPIQHQDWMSGK | |
| | EFKCKVNNKDLPAPIERTISKPKGSVRA | |
| | PQVYVLPPPEEEMTKKQVTLTCMVTD | |
| | FMPEDIYVEWTNNGKTELNYKNTEPV | |
| | LDSDGSYFMYSKLRVEKKNWVERNSY | |
| | SCSVVHEGLHNHHTTKSFSRTPGK | |
| | (SEQ ID NO: 780) | |
| I23RB33 | QVQLVQSGAEVKKPGSSVKVSCKASG | EIVLTQSPATLSLSPGERATLSCRASQS |
| 0 | GTFSSYAISWVRQAPGQGLEWMGGIIP | VSSYLAWYQQKPGQAPRLLIYDASNR |
| | IFGTANYAQKFQGRVTITADESTSTAY | ATGIPARFSGSGSGTDFTLTISSLEPEDF |
| | MELSSLRSEDTAVYYCARDRSYSYGLS | AVYYCQQRSNTPLTFGQGTKVEIKRA |
| | GLGYYGFDYWGQGTLVTVSSAKTTAP | DAAPTVSIFPPSSEQLTSGGASVVCFLN |
| | SVYPLAPVCGDTTGSSVTLGCLVKGYF | NFYPKDINVKWKIDGSERQNGVLNSW |
| | PEPVTLTWNSGSLSSGVHTFPAVLQSD | TDQDSKDSTYSMSSTLTLTKDEYERHN |
| | LYTLSSSVTVTSSTWPSQSITCNVAHPA | SYTCEATHKTSTSPIVKSFNRNEC (SEQ |
| | SSTKVDKKIEPRGPTIKPCPPCKCPAPN | ID NO: 783) |
| | LLGGPSVFIFPPKIKDVLMISLSPIVTCV | |
| | VVDVSEDDPDVQISWFVNNVEVHTAQ | |
| | TQTHREDYNSTLRVVSALPIQHQDWM | |
| | SGKEFKCKVNNKDLPAPIERTISKPKGS | |
| | VRAPQVYVLPPPEEEMTKKQVTLTCM | |
| | VTDFMPEDIYVEWTNNGKTELNYKNT | |
| | EPVLDSDGSYFMYSKLRVEKKNWVER | |
| | NSYSCSVVHEGLHNHHTTKSFSRTPGK | |
| | (SEQ ID NO: 782) | |
| I23RB33 | QVQLQQPGAELVMPGASVKLSCKASG | DIVLTQSPASLAVSLGQRATISCKASQS |
| 2 | YTFTSYWMHWVKQRPGQGLEWIGEID | VDYDGDSYMNWYQQKPGQPPKLLIY |
| | PSDSYTNYNQKFKGKSTLTVDKSSSTA | AASNLESGIPARFSGSGSGTDFTLNIHP |
| | YMQLSSLTSEDSAVYYCARSYAFDYW | VEEEDAATYYCQQSNEDPWTFGGGTK |
| | GQGTTVTVSSAKTTAPSVYPLAPVCGD | LEIKRADAAPTVSIFPPSSEQLTSGGAS |
| | TTGSSVTLGCLVKGYFPEPVTLTWNSG | VVCFLNNFYPKDINVKWKIDGSERQN |
| | SLSSGVHTFPAVLQSDLYTLSSSVTVTS | GVLNSWTDQDSKDSTYSMSSTLTLTK |
| | STWPSQSITCNVAHPASSTKVDKKIEPR | DEYERHNSYTCEATHKTSTSPIVKSFN |
| | GPTIKPCPPCKCPAPNLLGGPSVFIFPPK | RNEC (SEQ ID NO: 785) |
| | IKDVLMISLSPIVTCVVVDVSEDDPDV | |
| | QISWFVNNVEVHTAQTQTHREDYNST | |
| | LRVVSALPIQHQDWMSGKEFKCKVNN | |
| | KDLPAPIERTISKPKGSVRAPQVYVLPP | |
| | PEEEMTKKQVTLTCMVTDFMPEDIYV | |
| | EWTNNGKTELNYKNTEPVLDSDGSYF | |
| | MYSKLRVEKKNWVERNSYSCSVVHE | |
| | GLHNHHTTKSFSRTPGK (SEQ ID | |
| | NO: 784) | |

TABLE 8
VH and VL AA Sequences of Examplary Phage Display Based IL-23R antibodies

| Names | VH Sequence | VL Sequence |
|---|---|---|
| I23RB1 | QVQLVQSGAEVKKPGSSVKVSCKASG | EIVLTQSPATLSLSPGERATLSCRASQS |
| | GTFKNYAISWVRQAPGQGLEWMGWI | VSSYLAWYQQKPGQAPRLLIYDASNR |
| | RPIFGTAYYAQKFQGRVTITADESTSTA | ATGIPARFSGSGSGTDFTLTISSLEPEDF |
| | YMELSSLRSEDTAVYYCARDSGSRYA | AVYYCQQRSNWPLTFGQGTKVEIK |
| | GRYAFDYWGQGTLVTVSS (SEQ ID | (SEQ ID NO: 787) |
| | NO: 786) | |
| I23RB2 | QVQLVQSGAEVKKPGSSVKVSCKASG | EIVLTQSPATLSLSPGERATLSCRASQS |
| | GTFSSYAISWVRQAPGQGLEWMGGIIP | VSSYLAWYQQKPGQAPRLLIYDASNR |
| | IFGTANYAQKFQGRVTITADESTSTAY | ATGIPARFSGSGSGTDFTLTISSLEPEDF |
| | MELSSLRSEDTAVYYCARDRYRYLGA | AVYYCQQRSNWPLTFGQGTKVEIK |
| | NGFDYWGQGTLVTVSS (SEQ ID | (SEQ ID NO: 789) |
| | NO: 788) | |
| I23RB3 | QVQLVQSGAEVKKPGSSVKVSCKASG | EIVLTQSPATLSLSPGERATLSCRASQS |
| | GTFKSYSIHWVRQAPGQGLEWMGGIIP | VSSYLAWYQQKPGQAPRLLIYDASNR |
| | YFGYANYAQKFQGRVTITADESTSTAY | ATGIPARFSGSGSGTDFTLTISSLEPEDF |
| | MELSSLRSEDTAVYYCARERGYYGSIY | AVYYCQQRSNWPLTFGQGTKVEIK |
| | YGGGFDYWGQGTLVTVSS (SEQ ID | (SEQ ID NO: 791) |
| | NO: 790) | |
| I23RB4 | QVQLVQSGAEVKKPGSSVKVSCKASG | EIVLTQSPATLSLSPGERATLSCRASQS |
| | GTFKTYAIHWVRQAPGQGLEWMGWII | VSSYLAWYQQKPGQAPRLLIYDASNR |
| | PIFGTANYAQKFQGRVTITADESTSTA | ATGIPARFSGSGSGTDFTLTISSLEPEDF |
| | YMELSSLRSEDTAVYYCARDGGYYGS | AVYYCQQRSNWPLTFGQGTKVEIK |
| | RYYPRSYYFDYWGQGTLVTVSS (SEQ | (SEQ ID NO: 793) |
| | ID NO: 792) | |
| I23RB5 | QVQLVQSGAEVKKPGSSVKVSCKASG | DIQMTQSPSSLSASVGDRVTITCRASQS |
| | GTFSSYAISWVRQAPGQGLEWMGGIIP | ISSYLNWYQQKPGKAPKLLIYAASSLQ |
| | IFGTANYAQKFQGRVTITADESTSTAY | SGVPSRFSGSGSGTDFTLTISSLQPEDF |
| | MELSSLRSEDTAVYYCARDSYYSTVT | ATYYCQQSYSTPLTFGQGTKVEIK |
| | YYYFDYWGQGTLVTVSS (SEQ ID | (SEQ ID NO: 795) |
| | NO: 794) | |
| I23RB6 | QVQLVQSGAEVKKPGSSVKVSCKASG | DIVMTQSPDSLAVSLGERATINCKSSQS |
| | GTFSSYAISWVRQAPGQGLEWMGGIIP | VLYSSNNKNYLAWYQQKPGQPPKLLI |
| | IFGTANYAQKFQGRVTITADESTSTAY | YWASTRESGVPDRFSGSGSGTDFTLTIS |
| | MELSSLRSEDTAVYYCARGRYIRSYDY | SLQAEDVAVYYCQQYYSTPLTFGQGT |
| | FDYWGQGTLVTVSS (SEQ ID NO: 796) | KVEIK (SEQ ID NO: 797) |
| I23RB7 | QIQLVQSGPELKKPGETVKISCKASGY | QIVLTQSPAIMSASPGEKVTMTCSASSS |
| | TFTTYGMSWVKQAPGKGLKWMGWIN | VSYMYWYQQKPGSSPRLLIYDTSNLA |
| | TYSGVPTYADDFKGRFAFSLETSASTA | SGVPVRFSGSGSGTSYSLTISRMEAED |
| | YLQINNLKNEDTATYYCARRDRYGYV | AATYYCQQWSSYPWTFGGGTKLEIK |
| | AGAFAYWGQGTLVTVSS (SEQ ID | (SEQ ID NO: 799) |
| | NO: 798) | |
| I23RB8 | QVQLVQSGAEVKKPGSSVKVSCKASG | EIVLTQSPATLSLSPGERATLSCRASQS |
| | GTFKTDYINWVRQAPGQGLEWMGGII | VSSYLAWYQQKPGQAPRLLIYDASNR |
| | PIFGTANYAQKFQGRVTITADESTSTA | ATGIPARFSGSGSGTDFTLTISSLEPEDF |
| | YMELSSLRSEDTAVYYCARGPSYAYG | AVYYCQQRSNWPLTFGQGTKVEIK |
| | SRTYGYFDYWGQGTLVTVSS (SEQ ID | (SEQ ID NO: 801) |
| | NO: 800) | |
| I23RB9 | QVQLVQSGAEVKKPGSSVKVSCKASG | EIVLTQSPATLSLSPGERATLSCRASQS |
| | GTFSSYAISWVRQAPGQGLEWMGGIIP | VSSYLAWYQQKPGQAPRLLIYDASNR |
| | IFGTANYAQKFQGRVTITADESTSTAY | ATGIPARFSGSGSGTDFTLTISSLEPEDF |
| | MELSSLRSEDTAVYYCARDRSYSYGLS | AVYYCQQRSNWPLTFGQGTKVEIK |
| | GLGYYGFDYWGQGTLVTVSS (SEQ ID | (SEQ ID NO: 803) |
| | NO: 802) | |
| I23RB10 | QVQLVQSGAEVKKPGSSVKVSCKASG | DIVMTQSPDSLAVSLGERATINCKSSQS |
| | GTFSSYAIHWVRQAPGQGLEWMGRIIP | VLYSSNNKNYLAWYQQKPGQPPKLLI |
| | ISGRANYAQKFQGRVTITADESTSTAY | YWASTRESGVPDRFSGSGSGTDFTLTIS |
| | MELSSLRSEDTAVYYCARDSYPSYGSG | SLQAEDVAVYYCQQYYSTPLTFGQGT |
| | GAFGYWGQGTLVTVSS (SEQ ID | KVEIK (SEQ ID NO: 805) |
| | NO: 804) | |
| I23RB259 | QVQLVQSGAEVKKPGSSVKVSCKASG | DIQMTQSPSSLSASVGDRVTITCRASQS |
| | GTFSSYGISWVRQAPGQGLEWMGWIS | ISNDLNWYQQKPGKAPKLLIYAASSLQ |
| | PIFGTTNYAQKFQGRVTITADESTSTAY | SGVPSRFSGSGSGTDFTLTISSLQPEDF |
| | MELSSLRSEDTAVYYCARMMMQSLD | ATYYCQQSYSTPLTFGQGTKVEIK |
| | YWGQGTLVTVSS (SEQ ID NO: 806) | (SEQ ID NO: 807) |
| I23RB260 | QVQLVQSGAEVKKPGSSVKVSCKASG | DIVMTQSPDSLAVSLGERATINCKSSQS |
| | GTFSSYGISWVRQAPGQGLEWMGGIIP | VLYSSNNKNYLAWYQQKPGQPPKLLI |
| | IFGTANYAQKFQGRVTITADESTSTAY | YSASTRESGVPDRFSGSGSGTDFTLTIS |
| | MELSSLRSEDTAVYYCARDFGWSLWF | SLQAEDVAVYYCQQSFHVPWTFGQGT |
| | DYWGQGTLVTVSS (SEQ ID NO: 808) | KVEIK (SEQ ID NO: 809) |
| I23RB261 | QVQLVQSGAEVKKPGSSVKVSCKASG | DIQMTQSPSSLSASVGDRVTITCRASQS |
| | GTFSSYAISWVRQAPGQGLEWMGWIS | INDDLNWYQQKPGKAPKLLIYAASSL |
| | PYFGTANYAQKFQGRVTITADESTSTA | QSGVPSRFSGSGSGTDFTLTISSLQPED |
| | YMELSSLRSEDTAVYYCARMYRQGFD | FATYYCQQSYSTPLTFGQGTKVEIK |
| | YWGQGTLVTVSS (SEQ ID NO: 810) | (SEQ ID NO: 811) |
| I23RB262 | QVQLVQSGAEVKKPGSSVKVSCKASG | DIQMTQSPSSLSASVGDRVTITCRASQS |
| | GTFSSYGISWVRQAPGQGLEWMGWIS | INKDLNWYQQKPGKAPKLLIYFASSLQ |
| | AIFGTANYAQKFQGRVTITADESTSTA | SGVPSRFSGSGSGTDFTLTISSLQPEDF |
| | YMELSSLRSEDTAVYYCARMLKQGFD | ATYYCQQSYSTPLTFGQGTKVEIK |
| | YWGQGTLVTVSS (SEQ ID NO: 812) | (SEQ ID NO: 813) |
| I23RB263 | QVQLVQSGAEVKKPGSSVKVSCKASG | DIQMTQSPSSLSASVGDRVTITCRASQS |
| | GTFSSYAISWVRQAPGQGLEWMGGIIP | ISSYLNWYQQKPGKAPKLLIYAASSLQ |
| | IFGTANYAQKFQGRVTITADESTSTAY | SGVPSRFSGSGSGTDFTLTISSLQPEDF |
| | MELSSLRSEDTAVYYCARFHRFWLDY | ATYYCQQPYSVPFTFGQGTKVEIK |
| | WGQGTLVTVSS (SEQ ID NO: 814) | (SEQ ID NO: 815) |
| I23RB264 | QVQLVQSGAEVKKPGSSVKVSCKASG | DIQMTQSPSSLSASVGDRVTITCRASQS |
| | GTFSSYAISWVRQAPGQGLEWMGGIIP | IDNDLNWYQQKPGKAPKLLIYNASSL |
| | IFGTANYAQKFQGRVTITADESTSTAY | QSGVPSRFSGSGSGTDFTLTISSLQPED |
| | MELSSLRSEDTAVYYCARRSSPGFDY | FATYYCQQPYSIPLTFGQGTKVEIK |
| | WGQGTLVTVSS (SEQ ID NO: 816) | (SEQ ID NO: 817) |
| I23RB265 | QVQLVQSGAEVKKPGSSVKVSCKASG | DIQMTQSPSSLSASVGDRVTITCRASQS |
| | GTFSSYAISWVRQAPGQGLEWMGGIIP | ISTWLNWYQQKPGKAPKLLIYKASSLQ |
| | IFGTANYAQKFQGRVTITADESTSTAY | SGVPSRFSGSGSGTDFTLTISSLQPEDF |
| | MELSSLRSEDTAVYYCARGFVPTQGSL | ATYYCQQYNSPPLTFGQGTKVEIK |
| | DYWGQGTLVTVSS (SEQ ID NO: 818) | (SEQ ID NO: 819) |
| I23RB266 | EVQLLESGGGLVQPGGSLRLSCAASGF | DIQMTQSPSSLSASVGDRVTITCRASQS |
| | TFSDYSMSWVRQAPGKGLEWVSVISG | ISSYLNWYQQKPGKAPKLLIYAASSLQ |
| | SGGSTYYADSVKGRFTISRDNSKNTLY | SGVPSRFSGSGSGTDFTLTISSLQPEDF |
| | LQMNSLRAEDTAVYYCAKHSMAGNS | ATYYCQQSYSTPLTFGQGTKVEIK |
| | FLRFLDYWGQGTLVTVSS (SEQ ID | (SEQ ID NO: 821) |
| | NO: 820) | |
| I23RB267 | EVQLVQSGAEVKKPGESLKISCKGSGY | EIVLTQSPGTLSLSPGERATLSCRASQS |
| | SFTSYWIGWVRQMPGKGLEWMGIIYP | VSSSYLAWYQQKPGQAPRLLIYGASSR |
| | GDSDTRYSPSFQGQVTISADKSISTAYL | ATGIPDRESGSGSGTDFTLTISRLEPEDF |
| | QWSSLKASDTAMYYCARVWYSSWDL | AVYYCQQYGSSPLTFGQGTKVEIK |
| | DYWGQGTLVTVSS (SEQ ID NO: 822) | (SEQ ID NO: 823) |
| I23RB268 | QVQLVQSGAEVKKPGSSVKVSCKASG | EIVLTQSPATLSLSPGERATLSCRASQS |
| | GTFSSYYIHWVRQAPGQGLEWMGGIIP | VSSYLAWYQQKPGQAPRLLIYDASNR |
| | IFGYANYAQKFQGRVTITADESTSTAY | ATGIPARFSGSGSGTDFTLTISSLEPEDF |
| | MELSSLRSEDTAVYYCARDPGSYGSV | AVYYCQQRSNWPLTFGQGTKVEIK |
| | YYRRSYYFDYWGQGTLVTVSS (SEQ | (SEQ ID NO: 825) |
| | ID NO: 824) | |
| I23RB269 | QVQLVQSGAEVKKPGSSVKVSCKASG | EIVLTQSPGTLSLSPGERATLSCRASQS |
| | GTFSDASISWVRQAPGQGLEWMGTIIPI | VSSSYLAWYQQKPGQAPRLLIYGASSR |
| | SGNANYAQKFQGRVTITADESTSTAY | ATGIPDRFSGSGSGTDFTLTISRLEPEDF |
| | MELSSLRSEDTAVYYCARDRYVWYY | AVYYCQQYGSSPLTFGQGTKVEIK |
| | WDGYFDYWGQGTLVTVSS (SEQ ID | (SEQ ID NO: 827) |
| | NO: 826) | |
| I23RB270 | QVQLVQSGAEVKKPGSSVKVSCKASG | EIVLTQSPATLSLSPGERATLSCRASQS |
| | GTFDSYAISWVRQAPGQGLEWMGGIIP | VSSYLAWYQQKPGQAPRLLIYDASNR |
| | ISGYANYAQKFQGRVTITADESTSTAY | ATGIPARFSGSGSGTDFTLTISSLEPEDF |
| | MELSSLRSEDTAVYYCARDLSGGYLG | AVYYCQQRSNWPLTFGQGTKVEIK |
| | LRTLYYYYFDYWGQGTLVTVSS (SEQ | (SEQ ID NO: 829) |
| | ID NO: 828) | |
| I23RB271 | EVQLLESGGGLVQPGGSLRLSCAASGF | DIQMTQSPSSLSASVGDRVTITCRASQS |
| | TFSSYAMSWVRQAPGKGLEWVSAISG | ISSYLNWYQQKPGKAPKLLIYAASSLQ |
| | SGGSTYYADSVKGRFTISRDNSKNTLY | SGVPSRFSGSGSGTDFTLTISSLQPEDF |
| | LQMNSLRAEDTAVYYCARDRGSAETF | ATYYCQQSYSTPLTFGQGTKVEIK |
| | DYWGQGTLVTVSS (SEQ ID NO: 830) | (SEQ ID NO: 831) |
| I23RB272 | EVQLLESGGGLVQPGGSLRLSCAASGF | EIVLTQSPGTLSLSPGERATLSCRASQS |
| | TFSSYAMSWVRQAPGKGLEWVSAISG | VSSSYLAWYQQKPGQAPRLLIYGASSR |
| | SGGSTYYADSVKGRFTISRDNSKNTLY | ATGIPDRFSGSGSGTDFTLTISRLEPEDF |
| | LQMNSLRAEDTAVYYCARDFGEPNGG | AVYYCQQYGSSPLTFGQGTKVEIK |
| | FDYWGQGTLVTVSS (SEQ ID NO: 832) | (SEQ ID NO: 833) |
| I23RB273 | EVQLLESGGGLVQPGGSLRLSCAASGF | DIQMTQSPSSLSASVGDRVTITCRASQS |
| | TFSSYAMSWVRQAPGKGLEWVSAISG | ISSYLNWYQQKPGKAPKLLIYAASSLQ |
| | SGGSTYYADSVKGRFTISRDNSKNTLY | SGVPSRFSGSGSGTDFTLTISSLQPEDF |
| | LQMNSLRAEDTAVYYCARDPSSYYYN | ATYYCQQSYSTPLTFGQGTKVEIK |
| | GYLGSYAFDYWGQGTLVTVSS (SEQ | (SEQ ID NO: 835) |
| | ID NO: 834) | |
| I23RB274 | EVQLLESGGGLVQPGGSLRLSCAASGF | DIQMTQSPSSLSASVGDRVTITCRASQS |
| | TFSSYAMSWVRQAPGKGLEWVSAISG | ISSYLNWYQQKPGKAPKLLIYAASSLQ |
| | SGGSTYYADSVKGRFTISRDNSKNTLY | SGVPSRFSGSGSGTDFTLTISSLQPEDF |
| | LQMNSLRAEDTAVYYCAREDATDSSD | ATYYCQQSYSTPLTFGQGTKVEIK |
| | YYFDYWGQGTLVTVSS (SEQ ID | (SEQ ID NO: 837) |
| | NO: 836) | |
| I23RB275 | EVQLLESGGGLVQPGGSLRLSCAASGF | DIQMTQSPSSLSASVGDRVTITCRASQS |
| | TFSDSGMSWVRQAPGKGLEWVSAIDG | ISSYLNWYQQKPGKAPKLLIYAASSLQ |
| | SGGTTYYADSVKGRFTISRDNSKNTLY | SGVPSRFSGSGSGTDFTLTISSLQPEDF |
| | LQMNSLRAEDTAVYYCARGSGGYVG | ATYYCQQSYSTPLTFGQGTKVEIK |
| | YGGFDYWGQGTLVTVSS (SEQ ID | (SEQ ID NO: 839) |
| | NO: 838) | |
| I23RB276 | EVQLLESGGGLVQPGGSLRLSCAASGF | DIQMTQSPSSLSASVGDRVTITCRASQS |
| | TFSNYAMSWVRQAPGKGLEWVSAISG | ISSYLNWYQQKPGKAPKLLIYAASSLQ |
| | SGGSTYYADSVKGRFTISRDNSKNTLY | SGVPSRFSGSGSGTDFTLTISSLQPEDF |
| | LQMNSLRAEDTAVYYCARDGSYGYR | ATYYCQQSYSTPLTFGQGTKVEIK |
| | GRRRRYYDYFDYWGQGTLVTVSS | (SEQ ID NO: 841) |
| | (SEQ ID NO: 840) | |
| I23RB277 | EVQLLESGGGLVQPGGSLRLSCAASGF | DIQMTQSPSSLSASVGDRVTITCRASQS |
| | TFSSYAMSWVRQAPGKGLEWVSAISG | ISSYLNWYQQKPGKAPKLLIYAASSLQ |
| | SGGSTYYADSVKGRFTISRDNSKNTLY | SGVPSRFSGSGSGTDFTLTISSLQPEDF |
| | LQMNSLRAEDTAVYYCARRRRYRYFD | ATYYCQQSYSTPLTFGQGTKVEIK |
| | YWGQGTLVTVSS (SEQ ID NO: 842) | (SEQ ID NO: 843) |
| I23RB278 | EVQLLESGGGLVQPGGSLRLSCAASGF | EIVLTQSPGTLSLSPGERATLSCRASQS |
| | TFSSYAMSWVRQAPGKGLEWVSAISG | VSSSYLAWYQQKPGQAPRLLIYGASSR |
| | SGGSTYYADSVKGRFTISRDNSKNTLY | ATGIPDRFSGSGSGTDFTLTISRLEPEDF |
| | LQMNSLRAEDTAVYYCVRGGSLGGGF | AVYYCQQYGSSPLTFGQGTKVEIK |
| | YFDYWGQGTLVTVSS (SEQ ID NO: 844) | (SEQ ID NO: 845) |
| I23RB279 | EVQLLESGGGLVQPGGSLRLSCAASGF | DIQMTQSPSSLSASVGDRVTITCRASQS |
| | TFDTYAMHWVRQAPGKGLEWVSWIS | ISSYLNWYQQKPGKAPKLLIYAASSLQ |
| | GEGGSTEYADSVKGRFTISRDNSKNTL | SGVPSRFSGSGSGTDFTLTISSLQPEDF |
| | YLQMNSLRAEDTAVYYCARDLGAYN | ATYYCQQSYSTPLTFGQGTKVEIK |
| | RPFYAFDYWGQGTLVTVSS (SEQ ID | (SEQ ID NO: 847) |
| | NO: 846) | |
| I23RB280 | EVQLLESGGGLVQPGGSLRLSCAASGF | EIVLTQSPGTLSLSPGERATLSCRASQS |
| | TFSNAAMHWVRQAPGKGLEWVSRID | VSSSYLAWYQQKPGQAPRLLIYGASSR |
| | GSGGYTEYADSVKGRFTISRDNSKNTL | ATGIPDRFSGSGSGTDFTLTISRLEPEDF |
| | YLQMNSLRAEDTAVYYCARELYSYLG | AVYYCQQYGSSPLTFGQGTKVEIK |
| | SSYYYGYFDYWGQGTLVTVSS (SEQ | (SEQ ID NO: 849) |
| | ID NO: 848) | |
| I23RB281 | EVQLLESGGGLVQPGGSLRLSCAASGF | DIQMTQSPSSLSASVGDRVTITCRASQS |
| | TFSSYAMSWVRQAPGKGLEWVSAISG | ISSYLNWYQQKPGKAPKLLIYAASSLQ |
| | SGGSTYYADSVKGRFTISRDNSKNTLY | SGVPSRFSGSGSGTDFTLTISSLQPEDF |
| | LQMNSLRAEDTAVYYCARGPYYSGTS | ATYYCQQSYSTPLTFGQGTKVEIK |
| | GYRSGGGFDYWGQGTLVTVSS (SEQ | (SEQ ID NO: 851) |
| | ID NO: 850) | |
| I23RB282 | EVQLLESGGGLVQPGGSLRLSCAASGF | DIQMTQSPSSLSASVGDRVTITCRASQS |
| | TFSNDAMNWVRQAPGKGLEWVSAID | ISSYLNWYQQKPGKAPKLLIYAASSLQ |
| | GNGGSTNYADSVKGRFTISRDNSKNTL | SGVPSRFSGSGSGTDFTLTISSLQPEDF |
| | YLQMNSLRAEDTAVYYCARDLGGYY | ATYYCQQSYSTPLTFGQGTKVEIK |
| | GRRRRYYGMDVWGQGTLVTVSS | (SEQ ID NO: 853) |
| | (SEQ ID NO: 852) | |
| I23RB283 | EVQLLESGGGLVQPGGSLRLSCAAIGF | EIVLTQSPGTLSLSPGERATLSCRASQS |
| | TFSSSAMHWVRQAPGKGLEWVSAIDG | VSSSYLAWYQQKPGQAPRLLIYGASSR |
| | EGGSTYYADSVKGRFTISRDNSKNTLY | ATGIPDRFSGSGSGTDFTLTISRLEPEDF |
| | LQMNSLRAEDTAVYYCAREVSSYGRY | AVYYCQQYGSSPLTFGQGTKVEIK |
| | GFGYWGQGTLVTVSS (SEQ ID NO: 854) | (SEQ ID NO: 855) |
| I23RB284 | EVQLLESGGGLVQPGGSLRLSCAASGF | DIQMTQSPSSLSASVGDRVTITCRASQS |
| | TFSSYAMSWVRQAPGKGLEWVSAISG | ISSYLNWYQQKPGKAPKLLIYAASSLQ |
| | SGGSTYYADSVKGRFTISRDNSKNTLY | SGVPSRFSGSGSGTDFTLTISSLQPEDF |
| | LQMNSLRAEDTAVYYCARGLAGNSSG | ATYYCQQSYSTPLTFGQGTKVEIK |
| | GGFDYWGQGTLVTVSS (SEQ ID | (SEQ ID NO: 857) |
| | NO: 856) | |
| I23RB285 | EVQLLESGGGLVQPGGSLRLSCAASGF | DIQMTQSPSSLSASVGDRVTITCRASQS |
| | TEDDYAMNWVRQAPGKGLEWVSAIA | ISSYLNWYQQKPGKAPKLLIYAASSLQ |
| | GNGGSTEYADSVKGRFTISRDNSKNTL | SGVPSRFSGSGSGTDFTLTISSLQPEDF |
| | YLQMNSLRAEDTAVYYCARDGGYPLT | ATYYCQQSYSTPLTFGQGTKVEIK |
| | AVTGIYFDYWGQGTLVTVSS (SEQ ID | (SEQ ID NO: 859) |
| | NO: 858) | |
| I23RB286 | EVQLLESGGGLVQPGGSLRLSCAASGF | DIQMTQSPSSLSASVGDRVTITCRASQS |
| | TFSDAGMSWVRQAPGKGLEWVSAISG | ISSYLNWYQQKPGKAPKLLIYAASSLQ |
| | NGGSTNYADSVKGRFTISRDNSKNTLY | SGVPSRFSGSGSGTDFTLTISSLQPEDF |
| | LQMNSLRAEDTAVYYCARRRRRASFD | ATYYCQQSYSTPLTFGQGTKVEIK |
| | YWGQGTLVTVSS (SEQ ID NO: 860) | (SEQ ID NO: 861) |
| I23RB287 | EVQLVQSGAEVKKPGESLKISCKGSGY | EIVLTQSPGTLSLSPGERATLSCRASQS |
| | SFTDAAIHWVRQMPGKGLEWMGTIDP | VSSSYLAWYQQKPGQAPRLLIYGASSR |
| | GDSTTRYSPSFQGQVTISADKSISTAYL | ATGIPDRFSGSGSGTDFTLTISRLEPEDF |
| | QWSSLKASDTAVYYCARDLYYTLEYN | AVYYCQQYGSSPLTFGQGTKVEIK |
| | WYYDAFDYWGQGTLVTVSS (SEQ ID | (SEQ ID NO: 863) |
| | NO: 862) | |
| I23RB288 | EVQLVQSGAEVKKPGESLKISCKGSGY | EIVLTQSPGTLSLSPGERATLSCRASQS |
| | SFKSDWISWVRQMPGKGLEWMGWIY | VSSSYLAWYQQKPGQAPRLLIYGASSR |
| | PGDSRTYYSPSFQGQVTISADKSISTAY | ATGIPDRFSGSGSGTDFTLTISRLEPEDF |
| | LOWSSLKASDTAVYYCARDSSYGTGN | AVYYCQQYGSSPLTFGQGTKVEIK |
| | RGGRSGAFDYWGQGTLVTVSS (SEQ | (SEQ ID NO: 865) |
| | ID NO: 864) | |
| I23RB289 | EVQLVQSGAEVKKPGESLKISCKGSGY | DIQMTQSPSSLSASVGDRVTITCRASQS |
| | SFDSAGINWVRQMPGKGLEWMGNIYP | ISSYLNWYQQKPGKAPKLLIYAASSLQ |
| | GDSDTRYSPSFQGQVTISADKSISTAYL | SGVPSRFSGSGSGTDFTLTISSLQPEDF |
| | QWSSLKASDTAVYYCARGGGSLGFDY | ATYYCQQSYSTPLTFGQGTKVEIK |
| | WGQGTLVTVSS (SEQ ID NO: 866) | (SEQ ID NO: 867) |
| I23RB290 | EVQLVQSGAEVKKPGESLKISCKGSGY | DIQMTQSPSSLSASVGDRVTITCRASQS |
| | SFKNDGIHWVRQMPGKGLEWMGWIA | ISSYLNWYQQKPGKAPKLLIYAASSLQ |
| | PGESTTGYSPSFQGQVTISADKSISTAY | SGVPSRFSGSGSGTDFTLTISSLQPEDF |
| | LOWSSLKASDTAVYYCARDLGGYGSA | ATYYCQQSYSTPLTFGQGTKVEIK |
| | SGRRSDYFDYWGQGTLVTVSS (SEQ | (SEQ ID NO: 869) |
| | ID NO: 868) | |
| I23RB291 | EVQLVQSGAEVKKPGESLKISCKGSGY | EIVLTQSPATLSLSPGERATLSCRASQS |
| | SFTSYYISWVRQMPGKGLEWMGNIYP | VSSYLAWYQQKPGQAPRLLIYDASNR |
| | GDSRTRYSPSFQGQVTISADKSISTAYL | ATGIPARFSGSGSGTDFTLTISSLEPEDF |
| | QWSSLKASDTAVYYCARDRYYGIPFD | AVYYCQQRSNWPLTFGQGTKVEIK |
| | YWGQGTLVTVSS (SEQ ID NO: 870) | (SEQ ID NO: 871) |
| I23RB292 | EVQLVQSGAEVKKPGESLKISCKGSGY | DIQMTQSPSSLSASVGDRVTITCRASQS |
| | SFDTDYINWVRQMPGKGLEWMGYILP | ISSYLNWYQQKPGKAPKLLIYAASSLQ |
| | GESDTRYSPSFQGQVTISADKSISTAYL | SGVPSRFSGSGSGTDFTLTISSLQPEDF |
| | QWSSLKASDTAVYYCARGGGYGLVN | ATYYCQQSYSTPLTFGQGTKVEIK |
| | RRRRSYAFDYWGQGTLVTVSS (SEQ | (SEQ ID NO: 873) |
| | ID NO: 872) | |
| I23RB313 | QVQLVQSGAEVKKPGSSVKVSCKASG | DIQMTQSPSSLSASVGDRVTITCRASQS |
| | GTFSSYGISWVRQAPGQGLEWMGWIS | IGEDLNWYQQKPGKAPKLLIYAASSLQ |
| | AIFGTTNYAQKFQGRVTITADESTSTA | SGVPSRFSGSGSGTDFTLTISSLQPEDF |
| | YMELSSLRSEDTAVYYCARGTVPGFD | ATYYCQQSYSTPLTFGQGTKVEIK |
| | YWGQGTLVTVSS (SEQ ID NO: 874) | (SEQ ID NO: 875) |
| I23RB314 | QVQLVQSGAEVKKPGSSVKVSCKASG | DIQMTQSPSSLSASVGDRVTITCRASQS |
| | GTFSSYGISWVRQAPGQGLEWMGWIS | ISEDLNWYQQKPGKAPKLLIYAASSLQ |
| | PIFGTANYAQKFQGRVTITADESTSTA | SGVPSRFSGSGSGTDFTLTISSLQPEDF |
| | YMELSSLRSEDTAVYYCARMMMQGF | ATYYCQQSYSTPLTFGQGTKVEIK |
| | DYWGQGTLVTVSS (SEQ ID NO: 876) | (SEQ ID NO: 877) |
| I23RB315 | QVQLVQSGAEVKKPGSSVKVSCKASG | EIVLTQSPATLSLSPGERATLSCRASQS |
| | DTFSSYAISWVRQAPGQGLEWMGWIS | VRKWLAWYQQKPGQAPRLLIYAASN |
| | AIFGNANYAQKFQGRVTITADESTSTA | RATGIPARFSGSGSGTDFTLTISSLEPED |
| | YMELSSLRSEDTAVYYCARGAGWTLL | FAVYYCQQYNNAPLTFGQGTKVEIK |
| | LDYWGQGTLVTVSS (SEQ ID NO: 878) | (SEQ ID NO: 879) |
| I23RB316 | QVQLVQSGAEVKKPGSSVKVSCKASG | DIQMTQSPSSLSASVGDRVTITCRASQS |
| | GTFSSYGISWVRQAPGQGLEWMGWIIP | ISNDLNWYQQKPGKAPKLLIYAASSLQ |
| | IFGTTNYAQKFQGRVTITADESTSTAY | SGVPSRFSGSGSGTDFTLTISSLQPEDF |
| | MELSSLRSEDTAVYYCARMMMQSLD | ATYYCQQSYSTPLTFGQGTKVEIK |
| | YWGQGTLVTVSS (SEQ ID NO: 880) | (SEQ ID NO: 881) |
| I23RB317 | QVQLVQSGAEVKKPGSSVKVSCKASG | EIVLTQSPATLSLSPGERATLSCRASQS |
| | GTFSSYAISWVRQAPGQGLEWMGGIIP | VDSFLAWYQQKPGQAPRLLIYTASNR |
| | IFGTANYAQKFQGRVTITADESTSTAY | ATGIPARFSGSGSGTDFTLTISSLEPEDF |
| | MELSSLRSEDTAVYYCARGNGVNYHS | AVYYCQQGNSAPFTFGQGTKVEIK |
| | ELDYWGQGTLVTVSS (SEQ ID NO: 882) | (SEQ ID NO: 883) |
| I23RB318 | QVQLVQSGAEVKKPGSSVKVSCKASG | DIQMTQSPSSLSASVGDRVTITCRASQS |
| | GTFSSYAISWVRQAPGQGLEWMGGIIP | IDRWLNWYQQKPGKAPKLLIYYASSL |
| | IFGTANYAQKFQGRVTITADESTSTAY | QSGVPSRFSGSGSGTDFTLTISSLQPED |
| | MELSSLRSEDTAVYYCARVRARHRGS | FATYYCQQSYSTPLTFGQGTKVEIK |
| | FDYWGQGTLVTVSS (SEQ ID NO: 884) | (SEQ ID NO: 885) |
| I23RB319 | QVQLVQSGAEVKKPGSSVKVSCKASG | DIQMTQSPSSLSASVGDRVTITCRASQS |
| | GTFSSYGISWVRQAPGQGLEWMGWIS | ITDDLNWYQQKPGKAPKLLIYAASSLQ |
| | AIFGTTNYAQKFQGRVTITADESTSTA | SGVPSRFSGSGSGTDFTLTISSLQPEDF |
| | YMELSSLRSEDTALYYCARPLKQAFD | ATYYCQQSYSTPLTFGQGTKVEIK |
| | YWGQGTLVTVSS (SEQ ID NO: 886) | (SEQ ID NO: 887) |
| I23RB320 | QVQLVQSGAEVKKPGSSVKVSCKASG | DIQMTQSPSSLSASVGDRVTITCRASQS |
| | GTFSSYGISWVRQAPGQGLEWMGWIS | ITSDLNWYQQKPGKAPKLLIYAASSLQ |
| | AIFGTTNYAQKFQGRVTITADESTSTA | SGVPSRFSGSGSGTDFTLTISSLQPEDF |
| | YMELSSLRSEDTAVYYCARNGTGNSF | ATYYCQQSYSTPLTFGQGTKVEIK |
| | DYWGQGTLVTVSS (SEQ ID NO: 888) | (SEQ ID NO: 889) |
| I23RB321 | QVQLVQSGAEVKKPGSSVKVSCKASG | DIQMTQSPSSLSASVGDRVTITCRASQS |
| | GTFSSYGISWVRQAPGQGLEWMGWIS | IGGDLNWYQQKPGKAPKLLIYAASSL |
| | AIFGTTNYAQKFQGRVTITADESTSTA | QSGVPSRFSGSGSGTDFTLTISSLQPED |
| | YMELSSLRSEDTAVYYCARHWLQSFD | FATYYCQQSYSTPLTFGQGTKVEIK |
| | YWGQGTLVTVSS (SEQ ID NO: 890) | (SEQ ID NO: 891) |
| I23RB328 | QVQLVQSGAEVKKPGSSVKVSCKASG | EIVLTQSPATLSLSPGERATLSCRASQS |
| | GTFSSYAISWVRQAPGQGLEWMGGIIP | VSSYLAWYQQKPGQAPRLLIYDASNR |
| | IFGTANYAQKFQGRVTITADESTSTAY | ATGVPARFSGSGTGTDFTLTISSLQPED |
| | MELSSLRSEDTAVYYCARGRYIRSYDY | VAVYYCQQRNSTPLTFGQGTKVEIK |
| | FDYWGQGTLVTVSS (SEQ ID NO: 892) | (SEQ ID NO: 893) |
| I23RB329 | QVQLVQSGAEVKKPGSSVKVSCKASG | EIVLTQSPATLSLSPGERATLSCRASQS |
| | GTFSSYAISWVRQAPGQGLEWMGGIIP | VSSYLAWYQQKPGQAPRLLIYDASNR |
| | IFGTANYAQKFQGRVTITADESTSTAY | ATGIPARFSGTGSGTDFTLTISSLEPEDF |
| | MELSSLRSEDTAVYYCARDSYYSTVT | ATYYCQQRSNTPLTFGQGTKVEIK |
| | YYYFDYWGQGTLVTVSS (SEQ ID | (SEQ ID NO: 895) |
| | NO: 894) | |
| I23RB330 | QVQLVQSGAEVKKPGSSVKVSCKASG | EIVLTQSPATLSLSPGERATLSCRASQS |
| | GTFSSYAISWVRQAPGQGLEWMGGIIP | VSSYLAWYQQKPGQAPRLLIYDASNR |
| | IFGTANYAQKFQGRVTITADESTSTAY | ATGIPARFSGSGSGTDFTLTISSLEPEDF |
| | MELSSLRSEDTAVYYCARDRSYSYGLS | AVYYCQQRSNTPLTFGQGTKVEIK |
| | GLGYYGFDYWGQGTLVTVSS (SEQ ID | (SEQ ID NO: 897) |
| | NO: 896) | |
| I23RB332 | QVQLQQPGAELVMPGASVKLSCKASG | DIVLTQSPASLAVSLGQRATISCKASQS |
| | YTFTSYWMHWVKQRPGQGLEWIGEID | VDYDGDSYMNWYQQKPGQPPKLLIY |
| | PSDSYTNYNQKFKGKSTLTVDKSSSTA | AASNLESGIPARFSGSGSGTDFTLNIHP |
| | YMQLSSLTSEDSAVYYCARSYAFDYW | VEEEDAATYYCQQSNEDPWTFGGGTK |
| | GQGTTVTVSS (SEQ ID NO: 898) | LEIK (SEQ ID NO: 899) |

TABLE 9
CDR AA Sequences of Exemplary Phage Display Based IL-23R antibodies

| Names | HCDR1 | HCDR2 | HCDR3 | LCDR1 | LCDR2 | LCDR3 |
|---|---|---|---|---|---|---|
| I23RB1 | GGTFKNY | IRPIFGTA | ARDSGSR | QSVSSY | DAS (SEQ | QQRSNWP |
| | A (SEQ ID | (SEQ ID | YAGRYAF | (SEQ ID | ID NO: 904) | LT (SEQ ID |
| | NO: 900) | NO: 901) | DY (SEQ ID | NO: 903) | | NO: 905) |
| | | | NO: 902) | | | |
| I23RB2 | GGTFSSYA | IIPIFGTA | ARDRYRY | QSVSSY | DAS (SEQ | QQRSNWP |
| | (SEQ ID | (SEQ ID | LGANGFD | (SEQ ID | ID NO: 910) | LT (SEQ ID |
| | NO: 906) | NO: 907) | Y (SEQ ID | NO: 909) | | NO: 911) |
| | | | NO: 908) | | | |
| I23RB3 | GGTFKSYS | IIPYFGYA | ARERGYY | QSVSSY | DAS (SEQ | QQRSNWP |
| | (SEQ ID | (SEQ ID | GSIYYGGG | (SEQ ID | ID NO: 916) | LT (SEQ ID |
| | NO: 912) | NO: 913) | FDY (SEQ | NO: 915) | | NO: 917) |
| | | | ID NO: 914) | | | |
| I23RB4 | GGTFKTY | IIPIFGTA | ARDGGYY | QSVSSY | DAS (SEQ | QQRSNWP |
| | A (SEQ ID | (SEQ ID | GSRYYPRS | (SEQ ID | ID NO: 922) | LT (SEQ ID |
| | NO: 918) | NO: 919) | YYFDY | NO: 921) | | NO: 923) |
| | | | (SEQ ID | | | |
| | | | NO: 920) | | | |
| I23RB5 | GGTFSSYA | IIPIFGTA | ARDSYYST | QSISSY | AAS (SEQ | QQSYSTPL |
| | (SEQ ID | (SEQ ID | VTYYYFD | (SEQ ID | ID NO: 928) | T (SEQ ID |
| | NO: 924) | NO: 925) | Y (SEQ ID | NO: 927) | | NO: 929) |
| | | | NO: 926) | | | |
| I23RB6 | GGTFSSYA | IIPIFGTA | ARGRYIRS | QSVLYSSN | WAS (SEQ | QQYYSTPL |
| | (SEQ ID | (SEQ ID | YDYFDY | NKNY | ID NO: 934) | T (SEQ ID |
| | NO: 930) | NO: 931) | (SEQ ID | (SEQ ID | | NO: 935) |
| | | | NO: 932) | NO: 933) | | |
| I23RB7 | GYTFTTYG | INTYSGVP | ARRDRYG | SSVSY | DTS (SEQ | QQWSSYP |
| | (SEQ ID | (SEQ ID | YVAGAFA | (SEQ ID | ID NO: 940) | WT (SEQ |
| | NO: 936) | NO: 937) | Y (SEQ ID | NO: 939) | | ID NO: 941) |
| | | | NO: 938) | | | |
| I23RB8 | GGTFKTD | IIPIFGTA | ARGPSYA | QSVSSY | DAS (SEQ | QQRSNWP |
| | Y (SEQ ID | (SEQ ID | YGSRTYG | (SEQ ID | ID NO: 946) | LT (SEQ ID |
| | NO: 942) | NO: 943) | YFDY (SEQ | NO: 945) | | NO: 947) |
| | | | ID NO: 944) | | | |
| I23RB9 | GGTFSSYA | IIPIFGTA | ARDRSYS | QSVSSY | DAS (SEQ | QQRSNWP |
| | (SEQ ID | (SEQ ID | YGLSGLG | (SEQ ID | ID NO: 952) | LT (SEQ ID |
| | NO: 948) | NO: 949) | YYGFDY | NO: 951) | | NO: 953) |
| | | | (SEQ ID | | | |
| | | | NO: 950) | | | |
| I23RB10 | GGTFSSYA | IIPISGRA | ARDSYPSY | QSVLYSSN | WAS (SEQ | QQYYSTPL |
| | (SEQ ID | (SEQ ID | GSGGAFG | NKNY | ID NO: 958) | T (SEQ ID |
| | NO: 954) | NO: 955) | Y (SEQ ID | (SEQ ID | | NO: 959) |
| | | | NO: 956) | NO: 957) | | |
| I23RB259 | GGTFSSYG | ISPIFGTT | ARMMMQ | QSISND | AAS (SEQ | QQSYSTPL |
| | (SEQ ID | (SEQ ID | SLDY (SEQ | (SEQ ID | ID NO: 964) | T (SEQ ID |
| | NO: 960) | NO: 961) | ID NO: 962) | NO: 963) | | NO: 965) |
| I23RB260 | GGTFSSYG | IIPIFGTA | ARDFGWS | QSVLYSSN | SAS (SEQ | QQSFHVP |
| | (SEQ ID | (SEQ ID | LWFDY | NKNY | ID NO: 970) | WT (SEQ |
| | NO: 966) | NO: 967) | (SEQ ID | (SEQ ID | | ID NO: 971) |
| | | | NO: 968) | NO: 969) | | |
| I23RB261 | GGTFSSYA | ISPYFGTA | ARMYRQG | QSINDD | AAS (SEQ | QQSYSTPL |
| | (SEQ ID | (SEQ ID | FDY (SEQ | (SEQ ID | ID NO: 976) | T (SEQ ID |
| | NO: 972) | NO: 973) | ID NO: 974) | NO: 975) | | NO: 977) |
| I23RB262 | GGTFSSYG | ISAIFGTA | ARMLKQG | QSINKD | FAS (SEQ | QQSYSTPL |
| | (SEQ | (SEQ ID | FDY (SEQ | (SEQ ID | ID NO: 982) | T (SEQ ID |
| | ID NO: 978) | NO: 979) | ID NO: 980) | NO: 981) | | NO: 983) |
| I23RB263 | GGTFSSYA | IIPIFGTA | ARFHRFW | QSISSY | AAS (SEQ | QQPYSVPF |
| | (SEQ ID | (SEQ ID | LDY (SEQ | (SEQ ID | ID NO: 988) | T (SEQ ID |
| | NO: 984) | NO: 985) | ID NO: 986) | NO: 987) | | NO: 989) |
| I23RB264 | GGTFSSYA | IIPIFGTA | ARRSSPGF | QSIDND | NAS (SEQ | QQPYSIPL |
| | (SEQ ID | (SEQ ID | DY (SEQ ID | (SEQ ID | ID NO: 994) | T (SEQ ID |
| | NO: 990) | NO: 991) | NO: 992) | NO: 993) | | NO: 995) |
| I23RB265 | GGTFSSYA | IIPIFGTA | ARGFVPTQ | QSISTW | KAS (SEQ | QQYNSPPL |
| | (SEQ ID | (SEQ ID | GSLDY | (SEQ ID | ID | T (SEQ ID |
| | NO: 996) | NO: 997) | (SEQ ID | NO: 999) | NO: 1000) | NO: 1001) |
| | | | NO: 998) | | | |
| I23RB266 | GFTFSDYS | ISGSGGST | AKHSMAG | QSISSY | AAS (SEQ | QQSYSTPL |
| | (SEQ ID | (SEQ ID | NSFLRFLD | (SEQ ID | ID | T (SEQ ID |
| | NO: 1002) | NO: 1003) | Y (SEQ ID | NO: 1005) | NO: 1006) | NO: 1007) |
| | | | NO: 1004) | | | |
| I23RB267 | GYSFTSY | IYPGDSDT | ARVWYSS | QSVSSSY | GAS (SEQ | QQYGSSPL |
| | W (SEQ ID | (SEQ ID | WDLDY | (SEQ ID | ID | T (SEQ ID |
| | NO: 1008) | NO: 1009) | (SEQ ID | NO: 1011) | NO: 1012) | NO: 1013) |
| | | | NO: 1010) | | | |
| I23RB268 | GGTFSSYY | IIPIFGYA | ARDPGSY | QSVSSY | DAS (SEQ | QQRSNWP |
| | (SEQ ID | (SEQ ID | GSVYYRR | (SEQ ID | ID | LT (SEQ ID |
| | NO: 1014) | NO: 1015) | SYYFDY | NO: 1017) | NO: 1018) | NO: 1019) |
| | | | (SEQ ID | | | |
| | | | NO: 1016) | | | |
| I23RB269 | GGTFSDAS | IIPISGNA | ARDRYVW | QSVSSSY | GAS (SEQ | QQYGSSPL |
| | (SEQ ID | (SEQ ID | YYWDGYF | (SEQ ID | ID | T (SEQ ID |
| | NO: 1020) | NO: 1021) | DY (SEQ ID | NO: 1023) | NO: 1024) | NO: 1025) |
| | | | NO: 1022) | | | |
| I23RB270 | GGTFDSY | IIPISGYA | ARDLSGG | QSVSSY | DAS (SEQ | QQRSNWP |
| | A (SEQ ID | (SEQ ID | YLGLRTLY | (SEQ ID | ID | LT (SEQ ID |
| | NO: 1026) | NO: 1027) | YYYFDY | NO: 1029) | NO: 1030) | NO: 1031) |
| | | | (SEQ ID | | | |
| | | | NO: 1028) | | | |
| I23RB271 | GFTFSSYA | ISGSGGST | ARDRGSA | QSISSY | AAS (SEQ | QQSYSTPL |
| | (SEQ ID | (SEQ ID | ETFDY | (SEQ ID | ID | T (SEQ ID |
| | NO: 1032) | NO: 1033) | (SEQ ID | NO: 1035) | NO: 1036) | NO: 1037) |
| | | | NO: 1034) | | | |
| I23RB272 | GFTFSSYA | ISGSGGST | ARDFGEPN | QSVSSSY | GAS (SEQ | QQYGSSPL |
| | (SEQ ID | (SEQ ID | GGFDY | (SEQ ID | ID | T (SEQ ID |
| | NO: 1038) | NO: 1039) | (SEQ ID | NO: 1041) | NO: 1042) | NO: 1043) |
| | | | NO: 1040) | | | |
| I23RB273 | GFTFSSYA | ISGSGGST | ARDPSSYY | QSISSY | AAS (SEQ | QQSYSTPL |
| | (SEQ ID | (SEQ ID | YNGYLGS | (SEQ ID | ID | T (SEQ ID |
| | NO: 1044) | NO: 1045) | YAFDY | NO: 1047) | NO: 1048) | NO: 1049) |
| | | | (SEQ ID | | | |
| | | | NO: 1046) | | | |
| I23RB274 | GFTFSSYA | ISGSGGST | AREDATD | QSISSY | AAS (SEQ | QQSYSTPL |
| | (SEQ ID | (SEQ ID | SSDYYFDY | (SEQ ID | ID | T (SEQ ID |
| | NO: 1050) | NO: 1051) | (SEQ ID | NO: 1053) | NO: 1054) | NO: 1055) |
| | | | NO: 1052) | | | |
| I23RB275 | GFTFSDSG | IDGSGGTT | ARGSGGY | QSISSY | AAS (SEQ | QQSYSTPL |
| | (SEQ ID | (SEQ ID | VGYGGFD | (SEQ ID | ID | T (SEQ ID |
| | NO: 1056) | NO: 1057) | Y (SEQ ID | NO: 1059) | NO: 1060) | NO: 1061) |
| | | | NO: 1058) | | | |
| I23RB276 | GFTFSNYA | ISGSGGST | ARDGSYG | QSISSY | AAS (SEQ | QQSYSTPL |
| | (SEQ ID | (SEQ ID | YRGRRRR | (SEQ ID | ID | T (SEQ ID |
| | NO: 1062) | NO: 1063) | YYDYFDY | NO: 1065) | NO: 1066) | NO: 1067) |
| | | | (SEQ ID | | | |
| | | | NO: 1064) | | | |
| I23RB277 | GFTFSSYA | ISGSGGST | ARRRRYR | QSISSY | AAS (SEQ | QQSYSTPL |
| | (SEQ ID | (SEQ ID | YFDY (SEQ | (SEQ ID | ID | T (SEQ ID |
| | NO: 1068) | NO: 1069) | ID | NO: 1071) | NO: 1072) | NO: 1073) |
| | | | NO: 1070) | | | |
| I23RB278 | GFTFSSYA | ISGSGGST | VRGGSLG | QSVSSSY | GAS (SEQ | QQYGSSPL |
| | (SEQ ID | (SEQ ID | GGFYFDY | (SEQ ID | ID | T (SEQ ID |
| | NO: 1074) | NO: 1075) | (SEQ ID | NO: 1077) | NO: 1078) | NO: 1079) |
| | | | NO: 1076) | | | |
| I23RB279 | GFTFDTYA | ISGEGGST | ARDLGAY | QSISSY | AAS (SEQ | QQSYSTPL |
| | (SEQ ID | (SEQ ID | NRPFYAFD | (SEQ ID | ID | T (SEQ ID |
| | NO: 1080) | NO: 1081) | Y (SEQ ID | NO: 1083) | NO: 1084) | NO: 1085) |
| | | | NO: 1082) | | | |
| I23RB280 | GFTFSNAA | IDGSGGYT | ARELYSYL | QSVSSSY | GAS (SEQ | QQYGSSPL |
| | (SEQ ID | (SEQ ID | GSSYYYG | (SEQ ID | ID | T (SEQ ID |
| | NO: 1086) | NO: 1087) | YFDY (SEQ | NO: 1089) | NO: 1090) | NO: 1091) |
| | | | ID | | | |
| | | | NO: 1088) | | | |
| I23RB281 | GFTFSSYA | ISGSGGST | ARGPYYS | QSISSY | AAS (SEQ | QQSYSTPL |
| | (SEQ ID | (SEQ ID | GTSGYRSG | (SEQ ID | ID | T (SEQ ID |
| | NO: 1092) | NO: 1093) | GGFDY | NO: 1095) | NO: 1096) | NO: 1097) |
| | | | (SEQ ID | | | |
| | | | NO: 1094) | | | |
| I23RB282 | GFTFSNDA | IDGNGGST | ARDLGGY | QSISSY | AAS (SEQ | QQSYSTPL |
| | (SEQ ID | (SEQ ID | YGRRRRY | (SEQ ID | ID | T (SEQ ID |
| | NO: 1098) | NO: 1099) | YGMDV | NO: 1101) | NO: 1102) | NO: 1103) |
| | | | (SEQ ID | | | |
| | | | NO: 1100) | | | |
| I23RB283 | GFTFSSSA | IDGEGGST | AREVSSYG | QSVSSSY | GAS (SEQ | QQYGSSPL |
| | (SEQ ID | (SEQ ID | RYGFGY | (SEQ ID | ID | T (SEQ ID |
| | NO: 1104) | NO: 1105) | (SEQ ID | NO: 1107) | NO: 1108) | NO: 1109) |
| | | | NO: 1106) | | | |
| I23RB284 | GFTFSSYA | ISGSGGST | ARGLAGN | QSISSY | AAS (SEQ | QQSYSTPL |
| | (SEQ ID | (SEQ ID | SSGGGFDY | (SEQ ID | ID | T (SEQ ID |
| | NO: 1110) | NO: 1111) | (SEQ ID | NO: 1113) | NO: 1114) | NO: 1115) |
| | | | NO: 1112) | | | |
| I23RB285 | GFTFDDY | IAGNGGST | ARDGGYP | QSISSY | AAS (SEQ | QQSYSTPL |
| | A (SEQ ID | (SEQ ID | LTAVTGIY | (SEQ ID | ID | T (SEQ ID |
| | NO: 1116) | NO: 1117) | FDY (SEQ | NO: 1119) | NO: 1120) | NO: 1121) |
| | | | ID | | | |
| | | | NO: 1118) | | | |
| I23RB286 | GFTFSDAG | ISGNGGST | ARRRRRA | QSISSY | AAS (SEQ | QQSYSTPL |
| | (SEQ ID | (SEQ ID | SFDY (SEQ | (SEQ ID | ID | T (SEQ ID |
| | NO: 1122) | NO: 1123) | ID | NO: 1125) | NO: 1126) | NO: 1127) |
| | | | NO: 1124) | | | |
| I23RB287 | GYSFTDA | IDPGDSTT | ARDLYYT | QSVSSSY | GAS (SEQ | QQYGSSPL |
| | A (SEQ ID | (SEQ ID | LEYNWYY | (SEQ ID | ID | T (SEQ ID |
| | NO: 1128) | NO: 1129) | DAFDY | NO: 1131) | NO: 1132) | NO: 1133) |
| | | | (SEQ ID | | | |
| | | | NO: 1130) | | | |
| I23RB288 | GYSFKSD | IYPGDSRT | ARDSSYGT | QSVSSSY | GAS (SEQ | QQYGSSPL |
| | W (SEQ ID | (SEQ ID | GNRGGRS | (SEQ ID | ID | T (SEQ ID |
| | NO: 1134) | NO: 1135) | GAFDY | NO: 1137) | NO: 1138) | NO: 1139) |
| | | | (SEQ ID | | | |
| | | | NO: 1136) | | | |
| I23RB289 | GYSFDSAG | IYPGDSDT | ARGGGSL | QSISSY | AAS (SEQ | QQSYSTPL |
| | (SEQ ID | (SEQ ID | GFDY (SEQ | (SEQ ID | ID | T (SEQ ID |
| | NO: 1140) | NO: 1141) | ID | NO: 1143) | NO: 1144) | NO: 1145) |
| | | | NO: 1142) | | | |
| I23RB290 | GYSFKND | IAPGESTT | ARDLGGY | QSISSY | AAS (SEQ | QQSYSTPL |
| | G (SEQ ID | (SEQ ID | GSASGRRS | (SEQ ID | ID | T (SEQ ID |
| | NO: 1146) | NO: 1147) | DYFDY | NO: 1149) | NO: 1150) | NO: 1151) |
| | | | (SEQ ID | | | |
| | | | NO: 1148) | | | |
| I23RB291 | GYSFTSYY | IYPGDSRT | ARDRYYGI | QSVSSY | DAS (SEQ | QQRSNWP |
| | (SEQ ID | (SEQ ID | PFDY (SEQ | (SEQ ID | ID | LT (SEQ ID |
| | NO: 1152) | NO: 1153) | ID | NO: 1155) | NO: 1156) | NO: 1157) |
| | | | NO: 1154) | | | |
| I23RB292 | GYSFDTD | ILPGESDT | ARGGGYG | QSISSY | AAS (SEQ | QQSYSTPL |
| | Y (SEQ ID | (SEQ ID | LVNRRRRS | (SEQ ID | ID | T (SEQ ID |
| | NO: 1158) | NO: 1159) | YAFDY | NO: 1161) | NO: 1162) | NO: 1163) |
| | | | (SEQ ID | | | |
| | | | NO: 1160) | | | |
| I23RB313 | GGTFSSYG | ISAIFGTT | ARGTVPGF | QSIGED | AAS (SEQ | QQSYSTPL |
| | (SEQ ID | (SEQ ID | DY (SEQ ID | (SEQ ID | ID | T (SEQ ID |
| | NO: 1164) | NO: 1165) | NO: 1166) | NO: 1167) | NO: 1168) | NO: 1169) |
| I23RB314 | GGTFSSYG | ISPIFGTA | ARMMMQ | QSISED | AAS (SEQ | QQSYSTPL |
| | (SEQ ID | (SEQ ID | GFDY (SEQ | (SEQ ID | ID | T (SEQ ID |
| | NO: 1170) | NO: 1171) | ID | NO: 1173) | NO: 1174) | NO: 1175) |
| | | | NO: 1172) | | | |
| I23RB315 | GDTFSSYA | ISAIFGNA | ARGAGWT | QSVRKW | AAS (SEQ | QQYNNAP |
| | (SEQ ID | (SEQ ID | LLLDY | (SEQ ID | ID | LT (SEQ ID |
| | NO: 1176) | NO: 1177) | (SEQ ID | NO: 1179) | NO: 1180) | NO: 1181) |
| | | | NO: 1178) | | | |
| I23RB316 | GGTFSSYG | IIPIFGTT | ARMMMQ | QSISND | AAS (SEQ | QQSYSTPL |
| | (SEQ ID | (SEQ ID | SLDY (SEQ | (SEQ ID | ID | T (SEQ ID |
| | NO: 1182) | NO: 1183) | ID | NO: 1185) | NO: 1186) | NO: 1187) |
| | | | NO: 1184) | | | |
| I23RB317 | GGTFSSYA | IIPIFGTA | ARGNGVN | QSVDSF | TAS (SEQ | QQGNSAPF |
| | (SEQ ID | (SEQ ID | YHSELDY | (SEQ ID | ID | T (SEQ ID |
| | NO: 1188) | NO: 1189) | (SEQ ID | NO: 1191) | NO: 1192) | NO: 1193) |
| | | | NO: 1190) | | | |
| I23RB318 | GGTFSSYA | IIPIFGTA | ARVRARH | QSIDRW | YAS (SEQ | QQSYSTPL |
| | (SEQ ID | (SEQ ID | RGSFDY | (SEQ ID | ID | T (SEQ ID |
| | NO: 1194) | NO: 1195) | (SEQ ID | NO: 1197) | NO: 1198) | NO: 1199) |
| | | | NO: 1196) | | | |
| I23RB319 | GGTFSSYG | ISAIFGTT | ARPLKQAF | QSITDD | AAS (SEQ | QQSYSTPL |
| | (SEQ ID | (SEQ ID | DY (SEQ ID | (SEQ ID | ID | T (SEQ ID |
| | NO: 1200) | NO: 1201) | NO: 1202) | NO: 1203) | NO: 1204) | NO: 1205) |
| I23RB320 | GGTFSSYG | ISAIFGTT | ARNGTGN | QSITSD | AAS (SEQ | QQSYSTPL |
| | (SEQ ID | (SEQ ID | SFDY (SEQ | (SEQ ID | ID | T (SEQ ID |
| | NO: 1206) | NO: 1207) | ID | NO: 1209) | NO: 1210) | NO: 1211) |
| | | | NO: 1208) | | | |
| I23RB321 | GGTFSSYG | ISAIFGTT | ARHWLQS | QSIGGD | AAS (SEQ | QQSYSTPL |
| | (SEQ ID | (SEQ ID | FDY (SEQ | (SEQ ID | ID | T (SEQ ID |
| | NO: 1212) | NO: 1213) | ID | NO: 1215) | NO: 1216) | NO: 1217) |
| | | | NO: 1214) | | | |
| I23RB328 | GGTFSSYA | IIPIFGTA | ARGRYIRS | QSVSSY | DAS (SEQ | QQRNSTPL |
| | (SEQ ID | (SEQ ID | YDYFDY | (SEQ ID | ID | T (SEQ ID |
| | NO: 1218) | NO: 1219) | (SEQ ID | NO: 1221) | NO: 1222) | NO: 1223) |
| | | | NO: 1220) | | | |
| I23RB329 | GGTFSSYA | IIPIFGTA | ARDSYYST | QSVSSY | DAS (SEQ | QQRSNTPL |
| | (SEQ ID | (SEQ ID | VTYYYFD | (SEQ ID | ID | T (SEQ ID |
| | NO: 1224) | NO: 1225) | Y (SEQ ID | NO: 1227) | NO: 1228) | NO: 1229) |
| | | | NO: 1226) | | | |
| I23RB330 | GGTFSSYA | IIPIFGTA | ARDRSYS | QSVSSY | DAS (SEQ | QQRSNTPL |
| | (SEQ ID | (SEQ ID | YGLSGLG | (SEQ ID | ID | T (SEQ ID |
| | | NO: 1231) | YYGFDY | NO: 1233) | NO: 1234) | NO: 1235) |
| | | | (SEQ ID | | | |
| | NO: 1230) | | NO: 1232) | | | |
| I23RB332 | GYTFTSY | IDPSDSYT | ARSYAFD | QSVDYDG | AAS (SEQ | QQSNEDP |
| | W (SEQ ID | (SEQ ID | Y (SEQ ID | DSY (SEQ | ID | WT (SEQ |
| | NO: 1236) | NO: 1237) | NO: 1238) | ID | NO: 1240) | ID |
| | | | | NO: 1239) | | NO: 1241) |

### Example 2: Binding Kinetics and Affinity Measurements

[1719] Affinity of the IL-23R mAbs for human and rat IL-23R ECD protein was determined using both purified and unpurified mAbs by Surface Plasmon Resonance (SPR) and Biolayer Interferometry (BLI) methods. BLI was also used to determine how many different epitopes on human IL-23R ECD are bound by the panel of immunization and phage display derived IL-23R mAbs through competition binding experiments. Commercially available IL-23R mAbs were included in the binding studies to IL-23R protein for comparison. The commercial antibodies evaluated were: Anti-IL23R, Rab Mab, clone EPR22838-4, AbCam cat #222104; Anti-IL23R, Mouse IgG2b, clone #218213, R&D cat #MAB14001; Anti-IL,23R, Mouse IgG1, clone #15N6C6, ThermoFisher cat #MA5-24804; Anti-IL,23R, Mouse IgG1, clone #ABM25G4, Abcam cat #ABM25G4; Anti-IL23R, Mouse IgG2b, LSBio cat #LS-C37068; Anti-IL23R, Mouse IgG₂ₐ, LSBio cat #LS-C308468; and Anti-IL,23R, Mouse IgG1, clone #51H9, LSBio cat #LS-C340289.

### Affinity Measurements

[1720] Surface Plasmon Resonance (SPR) and Biolayer Interferometry are label-free detection methods used to investigate biomolecular interactions. By monitoring small changes in mass on a sensor surface, these direct real-time binding assays provide qualitative and quantitative data about the interaction between biomolecules; i.e. determination of equilibrium binding constant (affinity, KD) and kinetic rate constants (ka/kd; rate of complex association ka, and rate of complex dissociation kd). This method is useful in studies of protein-protein and protein-nucleic acid interactions, as well as interactions between proteins and small molecules. Here, interactions between IL-23R antibodies and human IL-23R and rat IL-23R extracellular domain (ECD) proteins were investigated.

[1721] The human IL-23R ECD sequence (SEQ ID NO:1) is provided above in Table 3. Sequence comparison and alignment of the human and rat IL-23R extracellular domain sequences demonstrates 76.74% sequence identity. The rat IL-23R ECD sequence (F1LX96 amino acids 24-354) is provided below:

(SEQ ID NO: 1267)
GIATINCSGNMWVEPGEIFQMGMNVSVYCQEALKNCRPRNLHFYKNGFK
ERFHITRINRTTARVWYKGFSEPHASMYCTAECPGRFQETLICGKDISS
GYPPDAPSNMTCVIYEYSGNMTCTWNTGKPTYIDTKYTVHVKSLETEEQ
QQYLASNYVNISTDSLQGGRKYLVWVQAVNALGMENSQQLQVHLDDIVI
PSPSIISRAETTNANVPKTIIYWKSKIMTGKVFCEMRYKATTNQTWNVK
EFDTNYTYVQQSEFYLEPNSKYVFQVRCQGTGKRNWQPWSSPFVHQTPQ
TASQVTSKPPHEPQKIEMLTATIFKGHSTSDNSQDIG

[1722] Affinity by SPR using ProteOn. Affinity measurements using Surface Plasmon Resonance (SPR) were performed using a ProteOn XPR36 system (BioRad). A biosensor surface was prepared by coupling anti-Mouse IgG Fc (Jackson cat #315-005-046) to the modified alginate polymer layer surface of a GLC chip (BioRad, Cat #176-5011) using the manufacturer instructions for amine-coupling chemistry. Approximately 6000 RU (response units) of mAbs were immobilized. The kinetic experiments were performed at 25° C. in running buffer (DPBS+0.01% P20+100 μg/ml BSA). To perform kinetic experiments, approximately 250 RU of mAbs were captured followed by injections of human IL-23R at concentrations ranging from 1.56 nM to 400 nM (in a 4-fold serial dilution). The association phase was monitored for 3 minutes at 50 μL/min, then followed by 10 minutes of buffer flow (dissociation phase). The chip surface was regenerated with two 18 second pulses of 100 mM H3PO4 (Sigma, Cat #7961) at 100 μL/min. The collected data were processed using ProteOn Manager software. First, the data was corrected for background using inter-spots. Then, double reference subtraction of the data was performed by using the buffer injection for analyte injections. The kinetic analysis of the data was performed using a Langmuir 1:1 binding model. The result for each mAb was reported in the format of Ka (On-rate), Kd (Off-rate) and KD (equilibrium dissociation constant).

[1723] Affinity by SPR using Biacore 8K. Affinity measurements using Surface Plasmon Resonance (SPR) were performed using a Biacore 8K system (Cytiva). A biosensor surface was prepared by coupling anti-Mouse IgG Fc (Jackson cat #315-005-046) to the surface of a CM5 chip using the manufacturer instructions for amine-coupling chemistry. Approximately 9000-10000 RU (response units) of mAbs were immobilized. The kinetic experiments were performed at 25° C. in running buffer 1× of (HBS-P+ Buffer 10× (Cytiva #BR100671)+100 μg/ml BSA). To perform kinetic experiments, approximately 150 RU of mAbs were captured followed by injections of human IL-23R or rat IL-23R at concentrations ranging from 0.8 nM to 500 nM (in a 5-fold serial dilution). The association phase was monitored for 3 minutes at 50 μL/min, then followed by 30 minutes of buffer flow (dissociation phase). The chip surface was regenerated with four 20 second pulses of 0.85% H3PO4 (Sigma, Cat #7961) at 100 μL/min. The collected data were processed using Biacore insight Evaluation software (Version 3.0.12.15655). The kinetic analysis of the data was performed using a Langmuir 1:1 binding model. The result for each mAb was reported in the format of Ka (On-rate), Kd (Off-rate) and KD (equilibrium dissociation constant).

[1724] Affinity by BLI using Octet Red 384. Affinity measurements using Biolayer Interferometry (BLI) were performed using an Octet Red 384 system (Sartorius). Antibodies were loaded on to Protein A biosensors (Sartorius, Cat #18-5010) to approximately a 1 nm shift. The kinetic experiments were performed at 25° C. in running buffer of (DPBS+0.02% P20⁺1 mg/ml BSA). To perform kinetic experiments, both human and rat IL-23R are associated at concentrations ranging from 1.37 nM to 1000 nM (in a 3-fold serial dilution). The association phase was monitored for 3 minutes with shaking at 1000 rpm, followed dissociation in buffer for 5 minutes, with shaking at 1000 rpm. The collected data was processed using Octet Evaluation software (Version 10). The kinetic analysis of the data was performed using a Langmuir 1:1 binding model. The result for each mAb was reported in the format of Ka (On-rate), Kd (Off-rate) and KD (equilibrium dissociation constant).

[1725] Six of the seven commercially available mAbs tested for binding kinetics by SPR or BLI were mouse IgG mAbs that had weak signal above background or no binding at the highest 4 μM concentration of human IL-23R extracellular domain protein (ECD) tested. The commercially available Abcam rabbit monoclonal antibody (RabMab) (catalog #222104) showed slightly stronger binding to human IL-23R ECD compared with the other 6 commercially available mAbs, but had a KD value >100 nM. The mAbs derived from phage panning and human IL-23R immunizations have a range of affinities from <51 μM to >263 nM and all have better human IL-23R ECD binding affinity than the commercially available R&D Systems human IL-23R mAb, MAB14001. MAB14001 showed no binding to human IL-23R ECD in SPR but had measurable binding to human IL-23R expressing cells in flow cytometry experiments. Most of the phage display and immunization derived mAbs also have better human IL-23R ECD binding affinity than the Abcam mAb (catalog #222104). Only some of the human IL-23R mAbs showed binding to rat IL-23R ECD. Affinities determined for the commercially available human IL-23R binding mAbs and those derived from phage panning and human BL-23R immunizations are summarized in Table 10.

[1726] Antibodies 123RB5, 23RB101, I23RB6, I23RB8, 23RB9, I23RB10, and 23RB80 show no binding or undetectable or very weak binding in the assays provided in Table 10. Other antibodies that showed no binding or undetectable or very weak binding are I23RB104, I23RB149, I23RB189, I23RB273, I23RB278, 23RB328, I23RB329, I23RB330 and I23RB332. These antibodies are useful in experiments and assays including as negative control antibodies, providing ‘true’ negatives isolated procedurally with the IL23R binders herein. For instance, I23RB5 has been used as a negative comtrol in various experiments and assays, including as provided herein.

TABLE 10
IL-23R mAb affinities for human and rat IL-23R ECD

| | | SPR data using BIACORE 8K | | | | | | | | | | |
|---|---|---|---|---|---|---|---|---|---|---|---|---|
| | | Binding to human IL-23R ECD (analysis 1) | | | | Binding to human IL-23R ECD (analysis 2) | | | | Binding to Rat IL-23R ECD | | |
| Sample type | mAb ID | ka (1/Ms) | kd (1/s) | KD (M) | Comment | ka (1/Ms) | kd (1/s) | KD (M) | Comment | ka (1/Ms) | kd (1/s) | KD (M) |
| Purified Protein | I23RB1 | | | | | 3.99E+05 | 1.11E−03 | 2.80E−09 | | binding not detectable | | |
| | I23RB3 | | | | | 5.36E+04 | 2.55E−04 | 4.76E−09 | | binding not detectable | | |
| | I23RB4 | | | | | 2.30E+05 | 1.35E−04 | 5.88E−10 | | binding not detectable | | |
| | I23RB5 | | | | | not binder | | | | binding not detectable | | |
| | I23RB7 | | | | | 1.99E+05 | 2.46E−04 | 1.23E−09 | | 2.42E+04 | 1.27E−02 | 5.24E−07 |
| | I23RB94 | 7.87E+05 | 6.30E−04 | 8.00E−10 | | 6.56E+05 | 7.53E−04 | 1.15E−09 | | binding not detectable | | |
| | I23RB92 | 2.65E+05 | <2.89E−05 | <1.09E−10 | slow off rate | 2.40E+05 | <2.89E−05 | <1.20E−10 | slow off rate | binding not detectable | | |
| | I23RB76 | 6.31E+05 | 5.62E−05 | 8.91E−11 | | 4.82E+05 | 4.14E−05 | 8.59E−11 | | binding not detectable | | |
| | I23RB65 | 4.84E+05 | <2.89E−05 | <5.97E−11 | slow off rate | 4.00E+05 | <2.89E−05 | <7.23E−11 | slow off rate | binding not detectable | | |
| | I23RB42 | 7.95E+05 | 5.76E−05 | 7.25E−11 | | 5.35E+05 | 6.25E−05 | 1.17E−10 | | 1.26E+05 | 8.77E−02 | 9.51E−07 |
| | I23RB32 | 5.50E+05 | 1.82E−04 | 3.32E−10 | | 5.06E+05 | 1.72E−04 | 3.40E−10 | | binding not detectable | | |
| | I23RB157 | 3.04E+05 | 8.68E−04 | 2.86E−09 | | 2.30E+05 | 9.47E−04 | 4.12E−09 | | 6.91E+04 | 5.48E−03 | 8.11E−08 |
| | I23RB33 | 9.57E+05 | 1.55E−04 | 1.62E−10 | | 6.91E+05 | 1.49E−04 | 2.16E−10 | | binding not detectable | | |
| | I23RB47 | | | | | 4.53E+05 | 5.17E−05 | 1.14E−10 | | binding not detectable | | |
| | I23RB35 | 5.49E+05 | <2.89E−05 | <5.27E−11 | slow off rate | 4.21E+05 | <2.89E−05 | <6.87E−11 | slow off rate | binding not detectable | | |
| | I23RB101 | No Binding | | | | not binder | | | | binding not detectable | | |
| Unpurified Protein | I23RB1 | | | | | 3.76E+05 | 9.82E−04 | 2.62E−09 | | binding not detectable | | |
| in Mammalian | I23RB3 | | | | | 5.83E+04 | 2.33E−04 | 3.99E−09 | | binding not detectable | | |
| Cell Expression | I23RB4 | | | | | 2.54E+05 | 1.21E−04 | 4.77E−10 | | binding not detectable | | |
| Crude Supernatants | I23RB5 | | | | | not a binder | | | | binding not detectable | | |
| | I23RB7 | | | | | 2.00E+05 | 2.47E−04 | 1.23E−09 | | binding not detectable | | |
| | I23RB94 | | | | | 6.85E+05 | 6.86E−04 | 1.00E−09 | | binding not detectable | | |
| | I23RB92 | | | | | 2.33E+05 | <2.89E−05 | <1.24E−10 | slow off rate | binding not detectable | | |
| | I23RB76 | | | | | 4.84E+05 | 3.90E−05 | 8.05E−11 | | binding not detectable | | |
| | I23RB65 | | | | | 4.16E+05 | 4.58E−05 | 1.10E−10 | | binding not detectable | | |
| | I23RB42 | | | | | 5.82E+05 | 6.29E−05 | 1.08E−10 | | binding not detectable | | |
| | I23RB32 | | | | | not a binder | | | | binding not detectable | | |
| | I23RB157 | | | | | 2.38E+05 | 9.46E−04 | 3.97E−09 | | 2.97E+03 | 5.83E−03 | 1.96E−06 |
| | I23RB33 | | | | | 6.72E+05 | 1.46E−04 | 2.18E−10 | | binding not detectable | | |
| | I23RB47 | 5.66E+05 | <2.89E−05 | <5.10E−11 | slow off rate | 4.45E+05 | 5.32E−05 | 1.19E−10 | | binding not detectable | | |
| | I23RB35 | | | | | 3.72E+05 | <2.89E−05 | <7.77E−11 | slow off rate | binding not detectable | | |
| | I23RB318 | 7.84E+04 | 1.67E−03 | 2.13E−08 | | 7.29E+04 | 1.56E−03 | 2.14E−08 | | binding not detectable | | |
| | I23RB313 | 5.80E+03 | <2.89E−05 | <4.98E−09 | slow off rate | 2.23E+04 | 1.08E−04 | 4.85E−09 | | binding not detectable | | |
| | I23RB270 | 5.35E+05 | 1.02E−03 | 1.91E−09 | | 4.09E+05 | 1.01E−03 | 2.46E−09 | | binding not detectable | | |
| | I23RB269 | 4.73E+05 | 5.14E−04 | 1.09E−09 | | 3.85E+05 | 5.42E−04 | 1.41E−09 | | binding not detectable | | |
| | I23RB268 | 2.28E+04 | 2.73E−04 | 1.20E−08 | | 1.63E+04 | 3.08E−04 | 1.89E−08 | | binding not detectable | | |
| | I23RB267 | 1.08E+04 | 1.96E−04 | 1.81E−08 | | 2.35E+04 | 1.78E−04 | 7.56E−09 | | Binding not detectable | | |
| | I23RB102 | | | | | 4.71E+05 | 8.73E−03 | 1.85E−08 | | Binding not detectable | | |
| | I23RB98 | 7.51E+04 | 2.94E−03 | 3.91E−08 | | 1.36E+05 | 3.50E−03 | 2.58E−08 | | Binding not detectable | | |
| | I23RB93 | 4.80E+05 | 1.38E−03 | 2.88E−09 | | 4.23E+05 | 1.23E−03 | 2.90E−09 | | Binding not detectable | | |
| | I23RB87 | | | | | 8.65E+04 | 9.45E−04 | 1.09E−08 | | Binding not detectable | | |
| | I23RB86 | 7.28E+04 | 5.87E−04 | 8.06E−09 | | 7.03E+04 | 5.72E−04 | 8.14E−09 | | Binding not detectable | | |
| | I23RB85 | 2.10E+05 | 2.26E−04 | 1.08E−09 | | 1.24E+05 | 1.78E−04 | 1.43E−09 | | Binding not detectable | | |
| | I23RB83 | 3.25E+05 | 1.19E−04 | 3.66E−10 | | 1.72E+05 | 5.91E−05 | 3.45E−10 | | Binding not detectable | | |
| | I23RB82 | 5.29E+05 | 2.47E−03 | 4.67E−09 | | 3.97E+05 | 1.36E−02 | 3.44E−08 | | Binding not detectable | | |
| | I23RB81 | not a binder | | | | 1.95E+05 | 1.73E−03 | 8.89E−09 | | Binding not detectable | | |
| | | (possibly | | | | | | | | | | |
| | | switched with | | | | | | | | | | |
| | | I23RB80**) | | | | | | | | | | |
| | I23RB80 | 7.74E+05 | 1.04E−02 | 1.34E−08 | ** | No Binding | | | | Binding not detectable | | |
| | I23RB78 | | | | | 1.79E+05 | 7.74E−04 | 4.33E−09 | | Binding not detectable | | |
| | I23RB77 | 1.39E+06 | 2.14E−03 | 1.54E−09 | | 5.56E+05 | 1.00E−02 | 1.80E−08 | | Binding not detectable | | |
| | I23RB74 | not a binder | | | | 9.54E+05 | 2.22E−03 | 2.33E−09 | | Binding not detectable | | |
| | I23RB73 | 3.22E+05 | 3.78E−03 | 1.17E−08 | | 2.13E+05 | 2.93E−03 | 1.37E−08 | | Binding not detectable | | |
| | I23RB71 | 7.04E+05 | 2.31E−04 | 3.28E−10 | | 3.58E+05 | 4.63E−05 | 1.29E−10 | | Binding not detectable | | |
| | I23RB67 | | | | | 6.77E+05 | 1.72E−02 | 2.54E−08 | | Binding not detectable | | |
| | I23RB61 | 4.59E+05 | 1.01E−02 | 2.21E−08 | | 3.55E+05 | 1.95E−03 | 5.50E−09 | | Binding not detectable | | |
| | I23RB60 | 2.98E+05 | 2.18E−04 | 7.31E−10 | | 3.62E+05 | 1.69E−04 | 4.66E−10 | | Binding not detectable | | |
| | I23RB58 | 3.28E+05 | 5.32E−03 | 1.62E−08 | | 2.33E+05 | 5.23E−03 | 2.25E−08 | | Binding not detectable | | |
| | I23RB57 | 1.02E+05 | 2.99E−03 | 2.92E−08 | | 8.07E+04 | 3.07E−03 | 3.81E−08 | | Binding not detectable | | |
| | I23RB56 | 1.68E+05 | 1.15E−02 | 6.84E−08 | | 3.52E+05 | 8.98E−03 | 2.55E−08 | | 8.97E+04 | 6.42E−02 | 7.15E−07 |
| | I23RB54 | | | | | 5.34E+05 | 9.79E−02 | 1.83E−07 | | Binding not detectable | | |
| | I23RB45 | 1.58E+05 | 3.32E−03 | 2.10E−08 | | 2.03E+05 | 4.56E−03 | 2.25E−08 | | 2.01E+03 | 3.43E−03 | 1.71E−07 |
| | I23RB39 | 2.31E+05 | 7.39E−03 | 3.20E−08 | | 4.82E+05 | 7.16E−03 | 1.49E−08 | | Binding not detectable | | |
| | I23RB36 | 8.64E+04 | 1.18E−03 | 1.37E−08 | | 5.92E+05 | 1.29E−03 | 2.18E−09 | | Binding not detectable | | |
| | I23RB31 | 6.55E+04 | 1.23E−03 | 1.89E−08 | | 9.13E+04 | 7.81E−04 | 8.55E−09 | | Binding not detectable | | |
| | I23RB30 | 2.20E+05 | 1.01E−02 | 4.62E−08 | | 2.12E+05 | 7.63E−03 | 3.59E−08 | | 2.98E+04 | 9.09E−03 | 3.06E−07 |
| | I23RB27 | 3.25E+05 | 3.72E−03 | 1.14E−08 | | 2.23E+05 | 4.16E−03 | 1.87E−08 | | Binding not detectable | | |
| | I23RB188 | 9.82E+04 | 1.30E−03 | 1.33E−08 | | 7.98E+04 | 1.51E−03 | 1.89E−08 | | Binding not detectable | | |
| | I23RB182 | 3.89E+04 | 1.94E−03 | 4.98E−08 | | 9.02E+04 | 3.94E−03 | 4.37E−08 | | Binding not detectable | | |
| | I23RB173 | 2.96E+05 | 7.59E−03 | 2.57E−08 | | 2.85E+05 | 1.03E−02 | 3.61E−08 | | Binding not detectable | | |
| | I23RB169 | 1.28E+05 | 1.16E−02 | 9.13E−08 | | 1.23E+05 | 4.27E−03 | 3.48E−08 | | Binding not detectable | | |
| | I23RB168 | 4.24E+05 | 1.18E−04 | 2.79E−10 | | 3.68E+05 | 1.55E−04 | 4.22E−10 | | Binding not detectable | | |
| | I23RB166 | 4.47E+05 | 1.93E−02 | 4.31E−08 | | 2.14E+05 | 9.42E−03 | 4.41E−08 | | Binding not detectable | | |
| | I23RB165 | 4.46E+05 | 8.06E−03 | 1.81E−08 | | 3.24E+05 | 9.41E−03 | 2.91E−08 | | Binding not detectable | | |
| | I23RB162 | 5.31E+05 | 2.37E−02 | 4.46E−08 | | 3.47E+05 | 2.16E−02 | 6.22E−08 | | Binding not detectable | | |
| | I23RB160 | 5.67E+05 | 9.55E−03 | 1.69E−08 | | 1.02E+06 | 1.42E−02 | 1.38E−08 | | Binding not detectable | | |
| | I23RB156 | 5.42E+05 | 2.18E−04 | 4.03E−10 | | 4.41E+05 | 2.59E−04 | 5.88E−10 | | Binding not detectable | | |
| | I23RB155 | 3.69E+05 | <2.89E−05 | <7.84E−11 | slow off rate | 2.39E+05 | <2.89E−05 | <1.21E−10 | slow off rate | Binding not detectable | | |
| | I23RB153 | 1.38E+05 | 2.26E−04 | 1.64E−09 | | 1.37E+05 | 3.18E−04 | 2.33E−09 | | 5.95E+04 | 5.48E−03 | 9.21E−08 |
| | I23RB150 | 3.41E+05 | 3.29E−02 | 9.65E−08 | | 3.34E+05 | 3.76E−02 | 1.12E−07 | | Binding not detectable | | |
| | I23RB148 | 5.25E+05 | 4.59E−04 | 8.74E−10 | | 4.98E+05 | 3.82E−04 | 7.66E−10 | | Binding not detectable | | |
| | I23RB144 | 8.90E+04 | 2.72E−03 | 3.06E−08 | | 5.20E+04 | 2.77E−03 | 5.33E−08 | | Binding not detectable | | |
| | I23RB260 | 1.84E+04 | 8.72E−05 | 4.75E−09 | | | | | | | | |
| | I23RB91 | 2.14E+04 | 1.10E−04 | 5.15E−09 | | | | | | | | |
| | I23RB177 | 1.88E+04 | 1.07E−04 | 5.70E−09 | | | | | | | | |
| | I23RB319 | 8.85E+03 | 8.01E−05 | 9.05E−09 | | | | | | | | |
| | I23RB259 | 5.59E+04 | 7.52E−04 | 1.34E−08 | | | | | | | | |
| | I23RB264 | 4.74E+04 | 8.47E−04 | 1.79E−08 | | | | | | | | |
| | I23RB321 | 2.09E+04 | 3.84E−04 | 1.84E−08 | | | | | | | | |
| | I23RB261 | 1.79E+04 | 4.02E−04 | 2.25E−08 | | | | | | | | |
| | I23RB317 | 2.36E+04 | 5.96E−04 | 2.52E−08 | | | | | | | | |
| | I23RB161 | 3.24E+05 | 2.74E−02 | 8.45E−08 | | | | | | | | |
| | I23RB180 | 2.01E+05 | 3.02E−02 | 1.50E−07 | | | | | | | | |
| | I23RB69 | 1.88E+05 | 4.93E−02 | 2.63E−07 | | | | | | | | |

| | | SPR data using ProteOn | | | BLI data using Octet | | | | | | |
|---|---|---|---|---|---|---|---|---|---|---|---|
| | | Binding to human IL-23R ECD | | | Binding to human IL-23R ECD | | | | Binding to Rat IL-23R ECD | | |
| Sample type | mAb ID | ka (1/Ms) | kd (1/s) | KD (M) | ka (1/Ms) | kd (1/s) | KD (M) | Comment | ka (1/Ms) | kd (1/s) | KD (M) |
| Purified | I23RB1 | 3.45E+06 | 2.29E−03 | 6.67E−10 | | | | | | | |
| Protein | I23RB2 | Weak binding | | >4.00E−6 | | | | | | | |
| | I23RB3 | 1.74E+05 | 3.35E−04 | 1.92E−09 | | | | | | | |
| | I23RB4 | 1.56E+06 | 2.35E−04 | 1.51E−10 | | | | | | | |
| | I23RB5 | Binding not detectable | | | | | | | | | |
| | I23RB6 | Binding not detectable | | | | | | | | | |
| | I23RB7 | 5.81E+05 | 2.26E−04 | 3.90E−10 | | | | | | | |
| | I23RB8 | Binding not detectable | | | | | | | | | |
| | I23RB9 | Binding not detectable | | | | | | | | | |
| | I23RB10 | Binding not detectable | | | | | | | | | |
| | I23RB157 | | | | 8.56E+04 | 6.60E−05 | 7.71E−10 | estimate | 7.34E+04 | 5.81E−03 | 7.91E−08 |
| Commercial | Anti-IL- | | | | Weak Binding | | | >1.00E−7 | 3.42E+04 | 6.78E−04 | 3.13E−08 |
| Antibodies | 23R, | | | | | | | | | | |
| | Rab | | | | | | | | | | |
| | Mab, | | | | | | | | | | |
| | clone | | | | | | | | | | |
| | EPR22 | | | | | | | | | | |
| | 838-4, | | | | | | | | | | |
| | AbCam | | | | | | | | | | |
| | cat | | | | | | | | | | |
| | #222104 | | | | | | | | | | |
| | Anti-IL- | Binding not detectable | | | | | | | | | |
| | 23R, | | | | | | | | | | |
| | Mouse | | | | | | | | | | |
| | IgG2b, | | | | | | | | | | |
| | clone | | | | | | | | | | |
| | #218213, | | | | | | | | | | |
| | R&D | | | | | | | | | | |
| | cat | | | | | | | | | | |
| | #MAB14001 | | | | | | | | | | |
| | Anti-IL- | Weak binding | | >4.00E−6 | | | | | | | |
| | 23R, | | | | | | | | | | |
| | Mouse | | | | | | | | | | |
| | IgG1, | | | | | | | | | | |
| | clone | | | | | | | | | | |
| | #15N6C6, | | | | | | | | | | |
| | Thermo | | | | | | | | | | |
| | Fisher | | | | | | | | | | |
| | cat | | | | | | | | | | |
| | #MA5- | | | | | | | | | | |
| | 24804 | | | | | | | | | | |
| | Anti-IL- | Weak binding | | >4.00E−6 | | | | | | | |
| | 23R, | | | | | | | | | | |
| | Mouse | | | | | | | | | | |
| | IgG1, | | | | | | | | | | |
| | clone | | | | | | | | | | |
| | #ABM25G4, | | | | | | | | | | |
| | Abcam | | | | | | | | | | |
| | cat | | | | | | | | | | |
| | #ABM25G4 | | | | | | | | | | |
| | Anti-IL- | Binding not detectable | | | | | | | | | |
| | 23R, | | | | | | | | | | |
| | Mouse | | | | | | | | | | |
| | IgG2b, | | | | | | | | | | |
| | LSBio | | | | | | | | | | |
| | cat #LS- | | | | | | | | | | |
| | C37068 | | | | | | | | | | |
| | Anti-IL- | Binding not detectable | | | | | | | | | |
| | 23R, | | | | | | | | | | |
| | Mouse | | | | | | | | | | |
| | IgG2a, | | | | | | | | | | |
| | LSBio | | | | | | | | | | |
| | cat #LS- | | | | | | | | | | |
| | C308468 | | | | | | | | | | |
| | Anti-IL- | Weak binding | | >4.00E−6 | | | | | | | |
| | 23R, | | | | | | | | | | |
| | Mouse | | | | | | | | | | |
| | IgG1, | | | | | | | | | | |
| | clone | | | | | | | | | | |
| | #5H9, | | | | | | | | | | |
| | LSBio | | | | | | | | | | |
| | cat #LS- | | | | | | | | | | |
| | C340289 | | | | | | | | | | |

Note:
samples were not analyzed
If koff is slower than the dissociation limit imposed by the data collection time, koff reported as < the koff limit (Koff is <2.89E−05)
Binding not detectable = No measureable binding signal up to the highest concentration of antigen tested
Weak binding = weak binding signal above background at the highest concentration of antigen tested

### IL-23R mAb Epitope Binning

[1727] Recombinant mAbs derived from human IL-23R phage panning and immunizations were paired together and evaluated for competitive binding to the human IL-23R ECD using Biolayer Interferometry (BLI) performed on the Sartorius Octet Red 384 instrument to group them into epitope bins, where mAbs that competed were grouped within the same bin or overlapping bins. If any mAbs did not demonstrate competition when paired with the other mAbs they were classified in their own unique bin. Sufficient binding affinity and/or concentration were required to interpret competitive binding results, and mAbs with affinities and/or concentrations that were too low were not included in an epitope bin with the bin being deemed inconclusive. 4 purified antibodies from the phage panning and 11 purified antibodies from the immunization campaign that exhibited the strongest binding to IL-23R protein, were paired against themselves in a full matrix. The remaining mAbs derived from immunizations or phage display were evaluated as unpurified mAb proteins in supernatants and were only binned against the purified mAb from each bin with the highest affinity.

[1728] Epitope Binning by BLI using Octet Red 384. Epitope Binning using Biolayer Interferometry (BLI) was performed using an Octet Red 384 system (Sartorius). To perform epitope binning, experiments were performed at 25° C. in running buffer of (DPBS+0.02% P20⁺1 mg/ml BSA). Biotinylated human IL-23R was loaded on to Streptavidin biosensors (Sartorius, Cat #18-5019) to approximately a 1 nm shift. Antibodies were diluted to 333 nM where concentration allowed. Antibody 1 was associated for 2 minutes. Excess was washed off with a 20 seconds dip into assay buffer. Antibody 2 was associated for 2 minutes. The collected data was processed using epitope binning module with the Octet Evaluation software (Version 10).

[1729] Thirty-seven of the anti-IL-23R mAbs derived from phage panning and immunizations were evaluated in epitope binning experiments resulting in at least nine unique bins covering 32 out of the 37 mAbs tested. Three of the remaining five mAbs fell within a unique bin and these mAbs have not been paired with each other, so it is not known if they share the same epitope bin or if there are additional bins within this set. The epitope bins and the mAbs included in each are summarized in Table 11. The diverse set of IL-23R binding sites reflected in these 9(+) epitope bins indicates that, in contrast to the single binding site of MAB14001, the panel of IL-23R mAbs offers a range IL-23R mAb:IL-23R interactions, which may improve receptor binding/detection, either through multiplexing (using a cocktail of multiple IL-23R mAbs functioning in a non-competitive fashion to boost signal) or by targeting a particular epitope that is more accessible to mAb binding.

TABLE 11
Epitope binning of human IL-23R binding mAbs on human IL-23R

| Bin | mAb ID |
|---|---|
| 1 | I23RB42* |
| | I23RB85 |
| | I23RB157* |
| 2 | I23RB32* |
| | I23RB33* |
| | I23RB39 |
| | I23RB60 |
| | I23RB65* |
| | I23RB92* |
| | I23RB94* |
| | I23RB156 |
| | I23RB160 |
| | I23RB162 |
| 3 | I23RB1* |
| | I23RB3* |
| | I23RB4* |
| | I23RB76* |
| | I23RB269 |
| | I23RB270 |
| 4 | I23RB35* |
| | I23RB93 |
| | I23RB155 |
| 5 | I23RB7* |
| 6 (2 & 5) | I23RB47* |
| | I23RB83 |
| | I23RB148 |
| | I23RB168 |
| 7 (2) | I23RB153 |
| 8 (3 & 4) | I23RB36 |
| | I23RB78 |
| 9 (3, 5 & 6) | I23RB45 |
| | I23RB318 |
| Unique | I23RB74 |
| | I23RB77 |
| | I23RB102 |
| Indeterminant | I23RB71 |
| | I23RB313 |
| | AbCam |
| | Ab222104 |

[1730] As shown in Table 11, anti-IL-23R mAbs (unpurified in supernatant and purified*) have been grouped into 9 bins using BLI (Octet RED384). mAbs in Bins 6, 7, 8 & 9 are defined as showing competition with at least one mAb in a previously identified Bin(s) shown in parentheses. I23RB74, I23RB77 and I23RB102 are listed as unique based on not competing with the purified antibodies they were tested against. These antibodies have not been tested against each other so they may or may not be in separate bins. mAbs listed as indeterminant are samples that may either be too low in concentration or too weak in affinity for a conclusive result.

### Binding to Human IL-23R Transfected Cell Lines

[1731] Recombinant human IL-23R binding mAbs derived from phage panning and immunizations were tested for binding to cell surface human IL-23R expressed on stably transfected iLite and/or HEK cell lines using flow cytometry. The mAbs were tested as either purified proteins or unpurified proteins in crude mammalian cell expression supernatants using either a single or multiple mAb concentrations. Whether the IL-23R mAbs can bind primary human cells expressing IL-23R was also determined by flow cytometry but with purified mAbs only. Commercially available IL-23R mAbs were included in the binding studies to IL-23R expressing cells for comparison.

[1732] Human IL-23R iLiTe cell single concentration mAb Binding. Anti-IL-23R mouse IgG₂ₐ mAbs derived from phage panning were tested for binding to human IL-23R expressing iLiTe cells, where a PE conjugated anti mouse secondary antibody detected mAbs bound to the receptor on the cells. Human IL-23R expressing iLite® IL-23 Assay Ready Cells (Eurodiagnostica, Catalog #BM4023) were thawed from cryopreservation, placed in 25 mL RPMI-1640 plus GlutaMAX-1 (ThermoFisher Scientific, Catalog #72400-047) containing 10% FBS (Gibco Life-Technologies, Catalog #16140-063) and 1% Penicillin-Streptomycin (Gibco Life-Technologies, Catalog #15140-122), and incubated overnight at 37° C., 5% CO₂. The next day 100,000 cells were added to each well of a 96 well V bottom plate (Costar, Catalog #3357), centrifuged at 450× gravity for 2 minutes, and then supernatants were decanted. Cells were then resuspended in 100 μL/well of 10% human serum (Valley Biomedical, Catalog #HP1022) in 1×DPBS (Gibco Life-Technologies, Catalog #14190-136) and incubated for 30 minutes on ice followed by centrifugation and decanting of the supernatants. Antibodies diluted to 3 μg/mL in Stain Buffer (BSA) (BD Pharmagen, Catalog #554657) were added at 100 μL/well and incubated on ice for 50 minutes, then plates were centrifuged and supernatants were decanted. Goat anti-mouse PE conjugated secondary antibody (Jackson ImmunoResearch Catalog #115-116-146) diluted 1:200 in Stain Buffer was added at 100 μL/well and incubated on ice for 30 minutes followed by centrifugation and decanting of the supernatants. Cells were washed by adding 100 μL/well of Stain Buffer followed by centrifugation and decanting of the supernatants. Cells were resuspended in 100 μL/well of Stain Buffer and analyzed on the Becton Dickenson LSR II FACS instrument with HTS module. Data was analyzed using FlowJo software (Treestar) to obtain geometric mean fluorescence intensities.

[1733] Human IL-23R iLiTe cell concentration response mAb binding. Anti-IL-23R mouse IgG₂ₐ mAbs derived from phage panning were tested for concentration dependent binding to human IL-23R expressing iLiTe cells relative to a mouse IgG₂ₐ isotype negative control mAb and the commercially available MAB14001 positive control mAb from R&D Systems, where a PE conjugated anti mouse secondary antibody detected mAbs bound to the receptor on the cells. Human IL-23R expressing iLite® IL-23 Assay Ready Cells (Eurodiagnostica, Catalog #BM4023) were thawed from cryopreservation, placed in 25 mL RPMI-1640 plus GlutaMAX-1 (ThermoFisher Scientific, Catalog #72400-047) containing 10% FBS (Gibco Life-Technologies, Catalog #16140-063) and 1% Penicillin-Streptomycin (Gibco Life-Technologies, Catalog #15140-122), and incubated overnight at 37° C., 5% CO₂. The next day 100,000 cells were added to each well of a 96 well V bottom plate (Costar, Catalog #3357), centrifuged at 450× gravity for 2 minutes, and then supernatants were decanted. Antibodies were diluted in Stain Buffer (BSA) (BD Pharmagen, Catalog #554657) and added at 50 μL/well, and mixed. Plates were incubated on ice for 50 minutes, then plates were centrifuged and supernatants were decanted. Goat anti-mouse PE conjugated secondary antibody (Jackson ImmunoResearch Catalog #115-116-146) diluted 1:200 in Stain Buffer was added at 100 μL/well and incubated on ice for 30 minutes followed by centrifugation and decanting of the supernatants. Cells were washed by adding 200 μL/well of Stain Buffer followed by centrifugation and decanting of the supernatants. Cells were resuspended in 100 μL/well of Stain Buffer, transferred in quadruplicate to a 384 well plate (Greiner, Catalog #781281) and analyzed on the Becton Dickenson LSR II FACS instrument with HTS module. Data was analyzed using FlowJo software (Treestar) to obtain geometric mean fluorescence intensities, and geometric mean fluorescence intensities were plotted over log mAb concentrations fitted with a sigmoidal dose response curve with variable slope using GraphPad Prism.

[1734] Five out of an initial 10 phage derived anti-IL-23R mAbs had measurable binding signals on human IL-23R iLite cells in a single concentration flow cytometry experiment using purified mAb proteins, which include I23RB1, I23RB2, I23RB3, I23RB4, I23RB7 (Table 12, Expt A & B). Subsequent concentration response binding experiments showed all five of these mAbs bound to human IL-23R iLite cells better than the R&D Systems MAB14001 mAb, with binding ranked in the following order I23RB1=I23RB4>I23RB7>I23RB3>I23RB2>MAB14001 (Table 12, Expt C). The lack of binding by I23RB5 repeated, giving the same signal as the mouse IgG₂ₐ isotype control. [00519]83 additional human IL-23R binding mAbs from phage panning and immunizations were also tested for binding to human IL-23R expressing HEK cells as either purified proteins or unpurified proteins in crude expression supernatants from transiently transfected CHO cells.

[1735] HEK-IL-23R cell concentration response mAb binding (8-point, 96-well assay). The immunization- and phage-derived anti-IL-23R mouse IgG₂ₐ mAbs were tested for concentration dependent binding to human IL-23R expressing HEK-IL-23R cells relative to a mouse IgG₂ₐ negative control mAb that does not bind to IL-23R on cells, I23RB5, where a 647 conjugated anti mouse secondary antibody detected antibody bound to the receptor on the cells. HEK-IL-23R and HEK-parental (pre-labeled with CellTrackerBlue, ThermoFisher, Cat #C2110) cells were washed with dPBS (Gibco, Cat #14190-136), detached with Accutase (StemCell Technologies, Cat #7920), resuspended in Assay medium (RPMI-1640 (ThermoFisher, Cat #11875135) with 10% fetal bovine serum (Gibco, Cat #A31604-01)), pelleted by centrifugation (3 min, 600 g), and resuspended at 4800 cells/μL. HEK-IL-23R and HEK-parental cells (12.5 μL of each, 120000 cells total) were plated in 2× replicate on 96-well V-bottom plates (Corning, Cat #3357) into 37° C. warmed Assay medium containing serially diluted IL-23R mAbs to a final volume of 150 μL. IL-23R mAbs were allowed to bind to cells for 30 minutes, at 37° C. Cells were next washed twice in ice-cold stain buffer (BD Biosciences, Cat #554657), then exposed to the anti-mouse-647 detection antibody (Jackson ImmunoResearch, Cat #115-606-062) diluted 1:350 in ice-cold stain buffer for 30 minutes on ice. Cells were next washed twice in ice-cold stain buffer, then resuspended in a final volume of 30 μL with Sytox Green viability dye (ThermoFisher, Cat #S7020). Plates were kept on ice until run for analysis on the iQue. All washes were performed by centrifugation (800 rcf, 3 minutes) followed by flick decantation to remove supernatants. Cell-binding to HEK-IL-23R cells was measured with FlowJo, by gating for single, viable cells and determining the geometric mean fluorescence intensity (MFI) for the 647 detection antibody. Geometric mean fluorescence intensities were plotted over log mAb concentrations fitted with a dose response curve with variable slope using GraphPad Prism. Cell binders were scored as those mAbs with MFI signals [S] at the maximum used concentration that were greater than baseline MFI signal [B]+3*StDev, where [B] is the MFI signal detected with the negative control, I23RB5, at an equivalent concentration.

[1736] HEK-IL-23R cell concentration response mAb binding (11-point, 384-well assay). The immunization- and phage-derived anti-IL-23R mouse IgG₂ₐ mAbs were tested for concentration dependent binding to human IL-23R expressing HEK-IL-23R cells relative to a mouse IgG₂ₐ negative control mAb that does not bind to IL-23R on cells, I23RB5, where a 647 conjugated anti mouse secondary antibody detected antibody bound to the receptor on the cells. HEK-IL-23R and HEK-parental (pre-labeled with CellTrackerBlue, ThermoFisher, Cat #C2110) cells were washed with dPBS (Gibco, Cat #14190-136), detached with Accutase (StemCell Technologies, Cat #7920), resuspended in Assay medium (RPMI-1640 (ThermoFisher, Cat #11875135) with 10% fetal bovine serum (Gibco, Cat #A31604-01), pelleted by centrifugation (3 min, 600 g), and resuspended at 2500 cells/μL. HEK-IL-23R and HEK-parental cells (10 μL of each, 50000 cells total) were plated in 4× replicate on 384-well V-bottom plates (Greiner, Cat #781281) into 37° C. warmed Assay medium containing serially diluted IL-23R mAbs, respectively, to a final volume of 80 μL. IL-23R mAbs were allowed to bind to cells for 30 minutes, at 37° C. Cells were next washed once in ice-cold stain buffer (BD Biosciences, Cat #554657), then exposed to the anti-mouse-647 detection antibody (Jackson ImmunoResearch, Cat #115-606-062) diluted 1:350 in ice-cold stain buffer for 30 minutes on ice. Cells were next washed twice in ice-cold stain buffer, then resuspended in a final volume of 10 μL with Sytox Green viability dye (ThermoFisher, Cat #S7020). Plates were kept on ice until run for analysis on the iQue. All washes were performed by centrifugation (800 rcf, 3 minutes) followed by automated aspiration to remove supernatants with plate washers. Cell-binding to HEK-IL-23R cells was measured with FlowJo, by gating for single, viable cells and determining the geometric mean fluorescence intensity (MFI) for the 647 detection antibody. Geometric mean fluorescence intensities were plotted over log mAb concentrations fitted with a dose response curve with variable slope using GraphPad Prism. Cell binders were scored as those mAbs with MFI signals [S] at the maximum used concentration that were greater than baseline MFI signal [B]+3*StDev, where [B] is the MFI signal detected with the negative control, I23RB5, at an equivalent concentration.

[1737] 11 of the 83 additional human IL-23R binding mAbs did not bind cells at thresholds above background (MFI >background * 3× Stdev). Of the 72 IL-23R mAbs that did exhibit cell binding to IL-23R above background, EC50 values ranged from 0.1 nM to >50 nM (Table 12, Expt D & E). Of these cell binders, 34 mAbs presented with MFI (@6.4 nM) values (Table 12, Expt E) that exceeded I23RB3, which together with I23RB2, both showed superior binding compared to MAB14001 [Table 12, Expts A-C(higher MFI, lower EC50)], indicating that these 34 mAbs are also superior to MAB14001 for the detection of IL-23R on cells. These 34 mAbs include I23RB1, I23RB102, I23RB148, I23RB155, I23RB156, I23RB157, I23RB160, I23RB162, I23RB166, I23RB27, I23RB270, I23RB30, I23RB318, I23RB32, I23RB33, I23RB36, I23RB39, I23RB4, I23RB42, I23RB45, I23RB47, I23RB58, I23RB65, I23RB7, I23RB73, I23RB74, I23RB76, I23RB77, I23RB81, I23RB82, I23RB86, I23RB92, I23RB93, and I23RB94. Human IL-23R binding mAbs I23RB71, 123RB165, and 123RB173 had EC50 values ≤9.7 nM (Table 12, Expt E), placing them in the >72 percentile (rank of mAbs Experiment E EC50), and demonstrating they are also superior to MAB14001 for the detection of IL-23R on cells.

[1738] The results of IL-23R binding mAbs affinities to human IL-23R expressed on stably transfected iLite and HEK cell lines are shown in Table 12.

TABLE 12
Binding of IL-23R mAbs to human IL-23R expressing cell lines

| | | | human IL-23R iLite cell binding | | | | |
|---|---|---|---|---|---|---|---|
| | | | Expt A | Expt B | Expt C (12-point) | | |
| | | | (1-point) | (1-point) | | Gate 1 + 2 | Gate 2 |
| | | | MFI @ | MFI @ | S > | EC50 | EC50 |
| | | mAb ID | 20 nM | 0.7 nM | B*3xStD | (nM) | (nM) |
| Commercial | | MAB14001 | NT | 280 | Y | ~2.96 | ~12.75 |
| Phage | Purified | I23RB1 | 5086 | 2994 | Y | 0.26 | 0.02 |
| derived | Protein | I23RB2 | 4107 | 670 | Y | 1.09 | 1.11 |
| mAbs | | I23RB3 | 4323 | 1461 | Y | 0.66 | 0.37 |
| | | I23RB4 | 4393 | 2990 | Y | 0.04 | 0.03 |
| | | I23RB5 | 105 | 94 | N | | |
| | | I23RB6 | 139 | NT | NT | NT | NT |
| | | I23RB7 | 4315 | 2231 | Y | 0.07 | 0.10 |
| | | I23RB8 | 105 | NT | NT | NT | NT |
| | | I23RB9 | 86 | NT | NT | NT | NT |
| | | I23RB10 | 359 | NT | NT | NT | NT |

| | | | human IL-23R HEK cell binding | | | | Percentile rank of mAbs | | |
|---|---|---|---|---|---|---|---|---|---|
| | | | Expt D (8-point, | | Expt E (11-point, | | (Top performer = 100%) | | |
| | | | 96well) | | 384well) | | | Expt E | |
| | | | S > | EC50 | MFI | EC50 | Expt D | (MFI @ | Expt E |
| | | mAb ID | B*3xStD | (nM) | (6.4 nM) | (nM) | (EC50) | 6.4 nM) | (EC50) |
| Commercial | | MAB14001 | NT | NT | NT | NT | NT | NT | NT |
| Phage | Purified | I23RB1 | NT | NT | 286726 | NT | NT | 92 | NT |
| derived | Protein | I23RB2 | NT | NT | NT | NT | NT | NT | NT |
| mAbs | | I23RB3 | NT | NT | 148614 | NT | NT | 61 | NT |
| | | I23RB4 | NT | NT | 224800 | NT | NT | 84 | NT |
| | | I23RB5 | NT | NT | 3915 | NT | NT | <31 | NT |
| | | I23RB6 | NT | NT | NT | NT | NT | NT | NT |
| | | I23RB7 | NT | NT | 171633 | NT | NT | 68 | NT |
| | | I23RB8 | NT | NT | NT | NT | NT | NT | NT |
| | | I23RB9 | NT | NT | NT | NT | NT | NT | NT |
| | | I23RB10 | NT | NT | NT | NT | NT | NT | NT |
| | Unpurified | I23RB321 | Y | 18.6 | NT | NT | 32 | <31 | <32 |
| | Protein in | I23RB319 | Y | 8.7 | NT | NT | 38 | <31 | <32 |
| | Mammalian | I23RB318 | Y | 0.5 | 196302 | 7.1 | 71 | 80 | 83 |
| | Cell | I23RB317 | Y | 31.0 | NT | NT | 25 | <31 | <32 |
| | Expression | I23RB313 | Y | >50.0 | NT | NT | 16-22 | <31 | <32 |
| | Crude | I23RB278 | N | | NT | NT | <14 | <31 | <32 |
| | Supernatants | I23RB277 | Y | >50.0 | NT | NT | 16-22 | <31 | <32 |
| | | I23RB273 | N | | NT | NT | <14 | <31 | <32 |
| | | I23RB270 | Y | 0.5 | 243373 | 7.2 | 74 | 86 | 80 |
| | | I23RB269 | Y | 0.6 | 96789 | 14.7 | 66 | 49 | 60 |
| | | I23RB268 | Y | 20.6 | 51882 | 38.2 | 31 | 36 | 46 |
| | | I23RB267 | Y | 9.4 | NT | NT | 35 | <31 | <32 |
| | | I23RB264 | Y | >50.0 | NT | NT | 16-22 | <31 | <32 |
| | | I23RB261 | Y | 9.2 | NT | NT | 36 | <31 | <32 |
| | | I23RB260 | Y | >50.0 | NT | NT | 16-22 | <31 | <32 |
| | | I23RB259 | Y | 29.7 | 30882 | >50.0 | 27 | 33 | 33-45 |
| | | I23RB332 | N | | NT | NT | <14 | <31 | <32 |
| | | I23RB330 | N | | NT | NT | <14 | <31 | <32 |
| | | I23RB329 | N | | NT | NT | <14 | <31 | <32 |
| | | I23RB328 | N | | NT | NT | <14 | <31 | <32 |
| Immu | Purified | I23RB94 | Y | 0.1 | 363988 | 2.8 | 99 | 99 | 99 |
| | | I23RB92 | Y | 0.2 | 375866 | 4.0 | 97 | 100 | 94 |
| | | I23RB76 | Y | 0.4 | 321510 | 11.9 | 79 | 95 | 63 |
| | | I23RB65 | Y | 0.3 | 274916 | 4.0 | 86 | 90 | 93 |
| | | I23RB42 | Y | 0.2 | 352620 | 3.1 | 92 | 97 | 98 |
| | | I23RB32 | Y | 0.4 | 292423 | 5.1 | 77 | 93 | 88 |
| | | I23RB157 | NT | NT | 180188 | 11.0 | NT | 71 | 68 |
| | | I23RB33 | Y | 0.2 | 305792 | 5.6 | 95 | 94 | 85 |
| | | I23RB47 | Y | 0.2 | 363504 | 4.1 | 91 | 98 | 91 |
| | | I23RB35 | Y | 0.2 | NT | NT | 96 | NT | NT |
| | | I23RB101 | N | | NT | NT | <14 | <31 | <32 |
| | Unpurified | I23RB104 | N | | NT | NT | <14 | <31 | <32 |
| | Protein in | I23RB102 | NT | NT | 257715 | 8.6 | NT | 87 | 76 |
| | Mammalian | I23RB98 | Y | 1.9 | 59393 | 28.7 | 47 | 38 | 50 |
| | Cell | I23RB95 | NT | NT | NT | NT | NT | NT | NT |
| | Expression | I23RB93 | Y | 0.5 | 192659 | 8.9 | 73 | 79 | 73 |
| | Crude | I23RB91 | Y | 30.3 | NT | NT | 26 | <31 | <32 |
| | Supernatants | I23RB87 | NT | NT | 86143 | >50.0 | NT | 46 | 33-45 |
| | | I23RB86 | Y | 1.2 | 164436 | 22.8 | 52 | 66 | 52 |
| | | I23RB85 | Y | ~0.6 | 64033 | 13.5 | 68 | 40 | 61 |
| | | I23RB83 | Y | 0.7 | 120645 | 31.5 | 60 | 59 | 49 |
| | | I23RB82 | Y | 0.6 | 180983 | 9.8 | 69 | 74 | 71 |
| | | I23RB81 | Y | 0.9 | 180907 | 7.2 | 55 | 72 | 82 |
| | | I23RB80 | N | | NT | NT | <14 | <31 | <32 |
| | | I23RB79 | NT | NT | NT | NT | NT | NT | NT |
| | | I23RB78 | NT | NT | 84244 | 15.8 | NT | 45 | 57 |
| | | I23RB77 | Y | 0.2 | 183687 | 4.8 | 94 | 75 | 89 |
| | | I23RB74 | Y | 0.3 | 184983 | 13.0 | 84 | 77 | 62 |
| | | I23RB73 | Y | 1.8 | 157826 | 11.6 | 48 | 64 | 67 |
| | | I23RB71 | Y | ~6.7 | 109959 | 3.4 | 39 | 54 | 96 |
| | | I23RB69 | Y | 0.6 | NT | NT | 65 | <31 | <32 |
| | | I23RB67 | NT | NT | 80940 | 18.0 | NT | 44 | 55 |
| | | I23RB66 | NT | NT | NT | NT | NT | NT | NT |
| | | I23RB61 | Y | 0.6 | 117821 | >50.0 | 70 | 57 | 33-45 |
| | | I23RB60 | Y | 0.6 | 93733 | 27.7 | 62 | 48 | 51 |
| | | I23RB58 | Y | 23.1 | 149794 | 11.6 | 30 | 62 | 65 |
| | | I23RB57 | Y | 5.0 | 99600 | >50.0 | 40 | 51 | 33-45 |
| | | I23RB56 | Y | 0.7 | 117690 | >50.0 | 61 | 56 | 33-45 |
| | | I23RB54 | NT | NT | 63092 | 35.2 | NT | 39 | 48 |
| | | I23RB45 | Y | 0.4 | 227725 | 4.5 | 78 | 85 | 90 |
| | | I23RB39 | Y | 0.3 | 277390 | 3.8 | 90 | 91 | 95 |
| | | I23RB36 | Y | 0.4 | 170901 | 7.3 | 81 | 67 | 79 |
| | | I23RB31 | Y | 1.7 | 78646 | >50.0 | 49 | 43 | 33-45 |
| | | I23RB30 | Y | 1.2 | 184569 | 8.3 | 51 | 76 | 77 |
| | | I23RB27 | Y | 3.5 | 152591 | >50.0 | 43 | 63 | 33-45 |
| | | I23RB189 | N | | NT | NT | <14 | <31 | <32 |
| | | I23RB188 | Y | 2.0 | 90088 | >50.0 | 45 | 47 | 33-45 |
| | | I23RB182 | Y | 36.4 | 26205 | >50.0 | 23 | 32 | 33-45 |
| | | I23RB180 | Y | 27.6 | NT | NT | 29 | <31 | <32 |
| | | I23RB177 | Y | >50.0 | NT | NT | 16-22 | <31 | <32 |
| | | I23RB173 | Y | 0.4 | 100271 | 7.4 | 82 | 52 | 78 |
| | | I23RB169 | Y | 0.7 | 131724 | 15.4 | 58 | 60 | 59 |
| | | I23RB168 | Y | 3.4 | 73043 | 22.1 | 44 | 41 | 54 |
| | | I23RB166 | Y | 0.3 | 197533 | 11.6 | 87 | 82 | 66 |
| | | I23RB165 | Y | 0.6 | 116290 | 9.7 | 64 | 55 | 72 |
| | | I23RB162 | Y | 0.1 | 269100 | 2.8 | 100 | 89 | 100 |
| | | I23RB161 | Y | 0.8 | NT | NT | 56 | <31 | <32 |
| | | I23RB160 | Y | 0.4 | 185189 | 5.6 | 75 | 78 | 87 |
| | | I23RB159 | Y | >50.0 | NT | NT | 16-22 | <31 | <32 |
| | | I23RB156 | Y | 0.4 | 174305 | 8.9 | 83 | 69 | 74 |
| | | I23RB155 | Y | 0.9 | 177295 | 10.1 | 53 | 70 | 70 |
| | | I23RB153 | Y | 4.4 | 52771 | >50.0 | 42 | 37 | 33-45 |
| | | I23RB150 | Y | 0.8 | 102513 | 16.2 | 57 | 53 | 56 |
| | | I23RB149 | N | | NT | NT | <14 | <31 | <32 |
| | | I23RB148 | Y | 0.3 | 202907 | 6.0 | 88 | 83 | 84 |
| | | I23RB144 | Y | 13.4 | 46250 | >50.0 | 34 | 34 | 33-45 |

NT—Not tested in this experiment
N—No cell binding observed
S—Geometric mean fluorescence intensity value for I23RB mAb at max concentration
B—Geometric mean fluorescence intensity value for I23RB5 negative control at equivalent concentration
StD—Standard deviation for I23RB5 negative control across replicate wells
MFI—Geometric mean fluorescence intensity of the detection antibody
Black filled cells indicate EC50 could not be calculated due to no observable cell binding
EC50 values that exceed the maximal [mAb] used in the experiment can not accurately be quantified and are listed as “>50”

[1739] mAbs ranking is shown in Table 12. For Experiment D, the 77 mAbs tested were ranked in ascending order by EC50. The relative position of all mAbs is indicated by the %, with the top performers (lowest EC50's) showing the highest %'s. A percentage range is included for mAbs that could not be accurately quantified due to poor cell binding or EC50's >50. For Experiment E (MFI), the 61 mAbs tested were ranked in descending order by MFI at 6.4 nM. The relative position of the mAbs is indicated by the %, with the top performers (highest MFI's) showing the highest %'s. 26 mAbs that were not tested because of poor cell binding in Experiment D were included in the rankings and pre-ranked at the bottom (range <31%). For experiment E (EC50), the 56 mAbs tested were ranked in ascending order by EC50 values. The relative position of the mAbs is indicated by the %, with the top performers (lowest EC50's) showing the highest %'s. 26 mAbs that were not tested because of poor cell binding in Experiment D were included in the rankings and pre-ranked at the bottom (range <32%). A percentage range is included for mAbs that could not be accurately quantified due to EC50's >50.

### Example 3: IL-23R mAbs Detect IL-23R on the Surface of Primary Human Immune Cells

[1740] Primary cell culture. Cryopreserved peripheral blood mononuclear cells (PBMCs) from healthy donors (AllCells) were thawed and washed twice in ImmunoCult-XF T cell expansion medium (XF-TCEM) (StemCell Technologies cat #10981) supplemented with CTL anti-aggregate wash (Cellular Technology Limited cat #CTL-AA-001). The cells were counted, resuspended at 2-6×10⁵ cells per mL XF-TCEM supplemented with penicillin and streptomycin (Sigma-Aldrich cat #P0781-100 ML) and 100 ng/mL IL-1β(Biolegend cat #579404), and cultured in flasks coated with 10 μg/mL anti-CD3 (clone UCHT1) (BD Pharmingen cat #555329) for 4 days at 37° C. in 5% CO₂. On day 4 of culture, PBMCs were collected, washed twice in RPMI-1640 supplemented with 0.1% BSA (RPMI-BSA), and counted. Cells were stained directly with anti-IL-23R mAbs or incubated in RPMI-BSA in upright tissue culture flasks for >4 hours at 37° C. in 5% CO₂ prior to staining. When functional IL-23R expression (i.e., IL-23 responsiveness) was assessed, cells were incubated in RPMI-BSA in upright tissue culture flasks for >4 hours at 37° C. in 5% CO₂.

[1741] Measurement of IL-23-induced STAT3 phosphorylation. To assess IL-23 responsiveness, a total of 6×10⁴ ‘cytokine-starved’ cells in 30 μL RPMI-BSA was transferred into each well of a 384-well plate. The cells were stimulated with a serial titration of IL-23 (internally sourced from Janssen). After a 30-minute incubation at 37° C. in 5% CO₂, the cells were transferred onto ice for 10 minutes and then lysed. Cell lysates were stored at −80° C. After thawing at room temperature, 25 μL of each lysate were transferred to MSD plates treated with ‘Blocker A’ provided with the MSD phospho-STAT panel kit (Meso Scale Discovery cat #K15202D). Following a one-hour incubation with shaking, the plates were washed with Tris wash buffer. A total of 25 μL detection antibodies was added to each well, and the plates were incubated for an additional hour with shaking. The plates were then washed three times. After the final wash, 150 μL read buffer were added to each well before reading the plates on a Meso Sector S 600 plate reader. Phosphorylated STAT3 levels (i.e., raw MSD plate reads) were plotted vs IL-23 concentration in GraphPad Prism. The EC₅₀ value for IL-23-induced STAT3 phosphorylation was calculated in GraphPad Prism using non-linear regression (curve fit)—[inhibitor] vs response (four-parameters)—robust regression.

[1742] An initial set of phage display-derived anti-IL-23R mAbs was tested for detection of IL-23R on the surface of primary immune cells by staining PBMCs that had been stimulated for 4 days with anti-CD3 in the presence of IL-1P, conditions that induce IL-23 responsiveness and by extension, IL-23R expression.

[1743] Surface IL-23R staining. For flow cytometric detection of IL-23R, up to ˜10⁶ cells were incubated in 50-100 μL Dulbecco's phosphate buffered saline (PBS) supplemented with 0.2% bovine serum albumin (BSA) or FACS staining buffer with BSA (BD Pharmingen cat #554657) supplemented with FcR blocking reagent (Miltenyi Biotec cat #130-059-901) and Ghost dye red 780 (Tonbo Biosciences cat #13-0865-T100). Following a 5-minute incubation on ice, 50 μL FACS staining buffer containing 20-30 μg/mL anti-IL-23R mAb were added to each sample such that the final concentration of antibody was 10 μg/mL. Cells were incubated for 60 minutes on ice and washed with FACS staining buffer. Cell pellets were resuspended in 100 μL FACS staining buffer containing biotinylated anti-mouse IgG₂ₐ secondary antibody (BD Pharmingen cat #550332) and incubated for 30 minutes on ice. After a second wash, cells were incubated in 100 μL FACS staining buffer containing streptavidin (SAV)-PE (BD Pharmingen cat #349023 or Biolegend cat #405203) and fluorescently labeled antibodies against relevant cell surface markers (Miltenyi Biotec and BD Pharmingen). Cells were acquired on a BD FACSCanto or FACSymphony cell analyzer, and data were analyzed using FlowJo software.

[1744] To amplify the IL-23R signal, a three-step staining strategy was employed in which bound anti-IL-23R was detected with a biotinylated anti-mouse IgG₂ₐ secondary antibody and streptavidin-PE. To establish a ‘cut-off’ for anti-IL-23R mAb binding, cells were incubated with buffer alone or the negative control mAb, I23RB5, during the first step of the three-step staining protocol. As an additional control, the biotinylated anti-mouse IgG₂ₐ secondary reagent was omitted from the second staining step.

[1745] As shown in FIG. 4, the omission of either the primary or second step antibodies as well as three-step staining with I23RB5 resulted in low or no background staining on CD8⁺ and CD8⁻ CD3⁺ CD56⁻ T cells and CD3⁻ CD56⁺ cells, respectively. A moderate level of nonspecific SAV-PE binding was detected on the surface of CD3⁺ CD56⁺ cells (FIG. 4). The phage display-derived anti-IL-23R mAbs I23RB1, I23RB2, I23RB3, I23RB4, and I23RB7 bound CD8⁺ and CD8⁻ CD3⁺ CD56⁻ T cells (FIG. 5, part A) and a small but detectable number of CD3⁻ CD56⁺ cells (FIG. 5, part C). A majority of CD3⁺ CD56⁺ cells was stained with each phage display-derived anti-IL-23R mAb evaluated (FIG. 5, part B).

[1746] Two additional sets of anti-IL-23R mAbs derived from immunizing mice with the extracellular domain of human IL-23R were tested as described above for flow cytometric detection of IL-23R on the surface of primary human immune cells. Of 26 mouse immunization-derived mAbs tested, 22 bound CD8⁺ and CD8⁻ CD3⁺ CD56⁻ T cells to varying degrees including I23RB42, I23RB32, I23RB33, I23RB47, I23RB65, I23RB92, I23RB94, I23RB76, I23RB35, I23RB36, I23RB45, I23RB77, I23RB78, I23RB83, I23RB85, I23RB148, I23RB153, I23RB155, I23RB156, I23RB168, I23RB269, and 123RB313 (representative data shown in FIG. 6). Of the immunization-derived mAbs, only I23RB76 gave equivalent (or improved) signal-to-noise relative to I23RB1, I23RB3, and I23RB4, the strongest cell binders among the previously identified phage display-derived mAbs. Notably, these four mAbs compete for binding to the IL-23R extracellular domain and thus, belong to the same ‘epitope bin.’

### Example 4: Confirmation of IL-23R mAb Binding Specificity by siRNA-Mediated IL23R Knock-Down

[1747] To confirm the specificity of the anti-IL-23R mAbs for IL-23R, PBMCs that had been stimulated for 3 days with anti-CD3 and IL-1P were electroporated with a mixture of siRNA targeting the IL23R transcript. Following electroporation, the cells were placed back into culture on anti-CD3-coated flasks for ˜24 hours, at which time the cells were pelleted for RNA isolation or stained for surface IL-23R and IL-12RP1 expression.

[1748] siRNA-mediated IL23R knock-down. PBMCs were cultured on anti-CD3-coated flasks in serum-free medium supplemented with 100 ng/mL IL-1β. On day 3 of culture, ˜10⁷ cells were resuspended in 200 μL electroporation buffer provided with the P3 Primary Cell 4D-Nucleofector X Kit S (Lonza cat #V4XP-3032). A mixture of three siRNA molecules targeting the IL23R gene (Thermo Fisher Scientific cat #AM16708 assay ID 110064, 110065, 110066) or a negative control siRNA (Thermo Fisher Scientific cat #AM4611) was added to the cells such that the final concentration of siRNA was 300 nM (100 nM of each individual IL23R siRNA or 300 nM of the negative control siRNA). Following electroporation, the cells were placed back into anti-CD3-coated flasks and cultured for an additional ˜24 hours. At that time, cells were stained for surface IL-23R and IL-12Rβ1 expression or pelleted for RNA isolation (Qiagen cat #74004). Isolated RNA was reverse transcribed into cDNA (Applied Biosystems cat #4374967) and IL23R and IL12RB1 transcript levels were analyzed by quantitative polymerase chain reaction (qPCR) (Thermo Fisher Scientific cat #4304437) using probes for IL23R (Hs00332759_ml), IL12RB1 (Hs01106578_ml), ACTB (Hs99999903_ml), B2M (Hs00187842_ml), GAPDH (Hs02786624_g1), and HPRT1 (Hs02800695_ml).

[1749] siRNA-mediated IL23R knock-down resulted in a ˜1.9 to 38-fold reduction in IL23R transcript levels compared with cells electroporated with a negative control siRNA (FIG. 7, part A). Transcript levels of IL12RB1 were either reduced or increased by IL23R knock-down depending on the housekeeping gene used for normalization (FIG. 7, part A).

[1750] Relative to cells electroporated with negative control siRNA, IL23R knock-down reduced I23RB4, I23RB7, and I23RB76 binding to CD4⁺ and CD8⁺ CD3⁺ CD56⁻ T cells (FIG. 7, parts B and C). Cells electroporated with IL23R or control siRNA expressed equivalent surface levels of IL-12RP1 (FIG. 7, part D). Thus, I23RB4, I23RB7, and I23RB76 specifically detect IL-23R on the surface of primary human CD3⁺ CD56⁻ T cells.

### Example 5: Antibody Cross-Reactive Binding to Rat IL-23R

[1751] Rat IL-23R cross-reactive binding was demonstrated in seven anti-human IL-23R antibodies that fall into several epitope bins, particularly falling into distinct epitope bins. Cross reactive binding is important and useful for application of the IL-23R antibodies in rats in vivo, ex vivo or in vitro (flow or other) studies without needing to generate specific anti-rat IL-23R surrogate antibodies with properties that approximately match those of any particular anti-human IL-23R mAb of interest. The generation of such surrogate mAbs can often be very challenging and require as much or even more work than that which was required to generate the initial human IL-23R antibodies. For these reasons, the anti-human IL-23R antibodies with rat IL-23R cross-reactive binding are of particular value.

[1752] Table 13 below is modified from Tables 10 and 11 to indicate the antibody epitope binning results and also focus on the human and rat IL-23R binding of antibodies that demonstrated rat IL-23R binding. Antibody binding characteristics as available for antibodies in each of the epitope bins is provided. Antibodies in each of Bins 1, 5, 7, and 9 and also not binned antibodies I23RB30 and I23RB56 demonstrate rat IL-23R binding. Antibodies I23RB30 and I23RB56 have not been epitope binned due to not meeting criteria used to include mAbs in the epitope binning experiments. This view of the binding information shows that two of these mAbs (I23RB7, I23RB153) are the only mAb in their respective epitope bins (#5, #7). Two mAbs (I23RB42, I23RB157) fall within the same bin (Bin 1). Bin 1 contains a third mAb (I23RB85) which did not demonstrate rat IL-23R cross-reactivity in these studies, but which is predicted to bind rat IL-23R. A mAb within Bin 1 would be expected to be rat cross-reactive based on the phenotype of the other Bin 1 mAbs. This lack of rat IL-23R binding by I23RB85 in the studies can be plausibly explained in a couple of possible ways. I23RB85 was assessed for rat IL-23R binding using non-purified protein in expression culture supernatant. In this form, the amount of antibody could be lower than estimated and therefore be at a concentration that does not allow detection of binding. This is observed with I23RB42, which shows rat IL-23R binding when using purified protein but not when using non-purified protein in expression supernatant (Table 10). Also, I23RB85 could have lower affinity for rat IL-23R than for human IL-23R and with that lower affinity, not show detectable binding under the experimental conditions used in the binding studies. 123RB7 is an example of a mAb with lower affinity to rat IL-23R than to human IL-23R. The rat cross-reactive mAb I23RB45 falls into another distinct epitope bin (9). Epitope Bin 9 contains a second mAb, I23RB318, which does not show binding to rat IL-23R. This lack of rat IL-23R binding, which would be unexpected, can be explained in the same was as is explained above for 23RB85.

[1753] Thus, overall, the following nine IL-23R antibodies have been shown to bind and/or are predicted to bind to rat IL-23R, based on rat binding studies and epitope binning: I23RB42, I23RB85, I23RB157, I23RB7, I23RB153, 23RB45, I23RB318, I23RB30 and I23RB56.

TABLE 13
Epitope binning and rat IL-23R binding
of human IL-23R binding mAbs

| | | Rat IL-23R ECD | Affinity to hu IL- |
|---|---|---|---|
| Bin | mAb ID | binder | 23R ECD (nm) |
| 1 | I23RB42* | yes | ≤0.1 |
| | I23RB85 | | 1 |
| | I23RB157* | yes | 3-4 |
| 2 | I23RB32* | | |
| | I23RB33* | | |
| | I23RB39 | | |
| | I23RB60 | | |
| | I23RB65* | | |
| | I23RB92* | | |
| | I23RB94* | | |
| | I23RB156 | | |
| | I23RB160 | | |
| | I23RB162 | | |
| 3 | I23RB1* | | |
| | I23RB3* | | |
| | I23RB4* | | |
| | I23RB76* | | |
| | I23RB269 | | |
| | I23RB270 | | |
| 4 | I23RB35* | | |
| | I23RB93 | | |
| | I23RB155 | | |
| 5 | I23RB7* | yes | 1 |
| 6 (2 & 5) | I23RB47* | | |
| | I23RB83 | | |
| | I23RB148 | | |
| | I23RB168 | | |
| 7 (2) | I23RB153 | yes | 2 |
| 8 (3 & 4) | I23RB36 | | |
| | I23RB78 | | |
| 9 (3, 5 & 6) | I23RB45 | yes | 2 |
| | I23RB318 | | 21 |
| Unique | I23RB74 | | |
| | I23RB77 | | |
| | I23RB102 | | |
| Indeterminant | I23RB71 | | |
| | I23RB313 | | |
| Not binned | I23RB30 | yes | 36-46 |
| | I23RB56 | yes | 26-68 |

### Example 6: Antibody CDR and Variable Region Sequences

[1754] Tables 4-6 and 7-9 provide Heavy chain (HC), light chain (LC), variable region heavy chain (VH) and light chain (VL) and heavy and light chain CDR sequences for the IL-23R antibodies described and provided herein. Antibody fragments, particularly active or functional fragments or antigen binding fragments, may include or comprise the respective CDR sequences or the VH or VL sequence or the HC or LC sequence of the antibodies disclosed herein, or portions thereof. A review of the sequences identifies antibodies with related, similar or identical sequences. Antibodies are below designated in five groupings, wherein the antibodies have identical LC, VH and light chain CDR1, CDR2 and CDR3 sequences. In each instance, however, the antibodies have distinct or unque HC, VH and heavy chain CDR1, CDR2 and CDR3 sequences.

[1755] For instance, some antibodies share light chain CDRs, and also may share LC and/or VL sequence. Notably these antibodies are distinct and unique in heavy chain sequence, including heavy chain CDRs and HC and VH sequences. The heavy chain sequences, including particularly the CDR sequences provided in and for these antibodies, are particularly responsible for binding differences or characteristics of these antibodies. Some bin together in the same epitope bin, while some are in distinct epitope bins or are uncharacterized by the bin analysis conducted. The below Table 13 identifies shared consensus light chain LC amino acid sequences and the corresponding IL-23R antibodies comprising the LC sequence. Table 14 identifies shared consensus VL sequences and the corresponding IL-23R antibodies comprising the VL sequence. Table 14 identifies shared consensus light chain CDR1, CDR2 and CDR3 sequences and the corresponding IL-23R antibodies comprising the CDR sequences.

TABLE 13
Shared Antibody LC Amino Acid Sequences

| | Corresponding Identical | Antibodies Comprising |
|---|---|---|
| LC Sequence and Consensus SEQ ID | Sequences and SEQ IDs | LC sequence |
| EIVLTQSPATLSLSPGERATLSCRASQS | SEQ ID NO: 673 | I23RB1 |
| VSSYLAWYQQKPGQAPRLLIYDASNR | SEQ ID NO: 675 | I23RB2 |
| ATGIPARFSGSGSGTDFTLTISSLEPEDF | SEQ ID NO: 677 | I23RB3 |
| AVYYCQQRSNWPLTFGQGTKVEIKRA | SEQ ID NO: 679 | I23RB4 |
| DAAPTVSIFPPSSEQLTSGGASVVCFLN | SEQ ID NO: 687 | I23RB8 |
| NFYPKDINVKWKIDGSERQNGVLNSW | SEQ ID NO: 689 | I23RB9 |
| TDQDSKDSTYSMSSTLTLTKDEYERHN | SEQ ID NO: 711 | I23RB268 |
| SYTCEATHKTSTSPIVKSFNRNEC | SEQ ID NO: 715 | I23RB270 |
| (SEQ ID NO: 1242) | SEQ ID NO: 757 | I23RB291 |
| DIQMTQSPSSLSASVGDRVTITCRASQS | SEQ ID NO: 681 | I23RB5 |
| ISSYLNWYQQKPGKAPKLLIYAASSLQ | SEQ ID NO: 707 | I23RB266 |
| SGVPSRFSGSGSGTDFTLTISSLQPEDF | SEQ ID NO: 717 | I23RB271 |
| ATYYCQQSYSTPLTFGQGTKVEIKRAD | SEQ ID NO: 721 | I23RB273 |
| AAPTVSIFPPSSEQLTSGGASVVCFLNN | SEQ ID NO: 723 | I23RB274 |
| FYPKDINVKWKIDGSERQNGVLNSWT | SEQ ID NO: 725 | I23RB275 |
| DQDSKDSTYSMSSTLTLTKDEYERHNS | SEQ ID NO: 727 | I23RB276 |
| YTCEATHKTSTSPIVKSFNRNEC | SEQ ID NO: 729 | I23RB277 |
| (SEQ ID NO: 1243) | SEQ ID NO: 733 | I23RB279 |
| | SEQ ID NO: 737 | I23RB281 |
| | SEQ ID NO: 739 | I23RB282 |
| | SEQ ID NO: 743 | I23RB284 |
| | SEQ ID NO: 745 | I23RB286 |
| | SEQ ID NO: 753 | I23RB289 |
| | SEQ ID NO: 755 | I23RB290 |
| | SEQ ID NO: 759 | I23RB292 |
| DIVMTQSPDSLAVSLGERATINCKSSQS | SEQ ID NO: 683 | I23RB6 |
| VLYSSNNKNYLAWYQQKPGQPPKLLI | SEQ ID NO: 691 | I23RB10 |
| YWASTRESGVPDRFSGSGSGTDFTLTIS | | |
| SLQAEDVAVYYCQQYYSTPLTFGQGT | | |
| KVEIKRADAAPTVSIFPPSSEQLTSGGA | | |
| SVVCFLNNFYPKDINVKWKIDGSERQN | | |
| GVLNSWTDQDSKDSTYSMSSTLTLTK | | |
| DEYERHNSYTCEATHKTSTSPIVKSFN | | |
| RNEC | | |
| (SEQ ID NO: 1244) | | |
| DIQMTQSPSSLSASVGDRVTITCRASQS | SEQ ID NO: 693 | I23RB259 |
| ISNDLNWYQQKPGKAPKLLIYAASSLQ | SEQ ID NO: 767 | I23RB316 |
| SGVPSRFSGSGSGTDFTLTISSLQPEDF | | |
| ATYYCQQSYSTPLTFGQGTKVEIKRAD | | |
| AAPTVSIFPPSSEQLTSGGASVVCFLNN | | |
| FYPKDINVKWKIDGSERQNGVLNSWT | | |
| DQDSKDSTYSMSSTLTLTKDEYERHNS | | |
| YTCEATHKTSTSPIVKSFNRNEC | | |
| (SEQ ID NO: 1245) | | |
| EIVLTQSPGTLSLSPGERATLSCRASQS | SEQ ID NO: 709 | I23RB267 |
| VSSSYLAWYQQKPGQAPRLLIYGASSR | SEQ ID NO: 713 | I23RB269 |
| ATGIPDRESGSGSGTDFTLTISRLEPEDF | SEQ ID NO: 719 | I23RB272 |
| AVYYCQQYGSSPLTFGQGTKVEIKRA | SEQ ID NO: 731 | I23RB278 |
| DAAPTVSIFPPSSEQLTSGGASVVCFLN | SEQ ID NO: 735 | I23RB280 |
| NFYPKDINVKWKIDGSERQNGVLNSW | SEQ ID NO: 741 | I23RB283 |
| TDQDSKDSTYSMSSTLTLTKDEYERHN | SEQ ID NO: 749 | I23RB287 |
| SYTCEATHKTSTSPIVKSFNRNEC | SEQ ID NO: 751 | I23RB288 |
| (SEQ ID NO: 1246) | | |

TABLE 14
Shared Antibody VL Amino Acid Sequences

| | Corresponding Identical | Antibodies Comprising |
|---|---|---|
| VL Sequence and Consensus SEQ ID | Sequences and SEQ IDs | VL sequence |
| EIVLTQSPATLSLSPGERATLSCRASQSVSSY | SEQ ID NO: 787 | I23RB1 |
| LAWYQQKPGQAPRLLIYDASNRATGIPARFS | SEQ ID NO: 789 | I23RB2 |
| GSGSGTDFTLTISSLEPEDFAVYYCQQRSNW | SEQ ID NO: 791 | I23RB3 |
| PLTFGQGTKVEIK | SEQ ID NO: 793 | I23RB4 |
| (SEQ ID NO: 1247) | SEQ ID NO: 801 | I23RB8 |
| | SEQ ID NO: 803 | I23RB9 |
| | SEQ ID NO: 825 | I23RB268 |
| | SEQ ID NO: 829 | I23RB270 |
| | SEQ ID NO: 871 | I23RB291 |
| DIQMTQSPSSLSASVGDRVTITCRASQSISSY | SEQ ID NO: 795 | I23RB5 |
| LNWYQQKPGKAPKLLIYAASSLQSGVPSRFS | SEQ ID NO: 821 | I23RB266 |
| GSGSGTDFTLTISSLQPEDFATYYCQQSYSTP | SEQ ID NO: 831 | I23RB271 |
| LTFGQGTKVEIK | SEQ ID NO: 835 | I23RB273 |
| (SEQ ID NO: 1248) | SEQ ID NO: 837 | I23RB274 |
| | SEQ ID NO: 839 | I23RB275 |
| | SEQ ID NO: 841 | I23RB276 |
| | SEQ ID NO: 843 | I23RB277 |
| | SEQ ID NO: 847 | I23RB279 |
| | SEQ ID NO: 851 | I23RB281 |
| | SEQ ID NO: 853 | I23RB282 |
| | SEQ ID NO: 857 | I23RB284 |
| | SEQ ID NO: 859 | I23RB286 |
| | SEQ ID NO: 867 | I23RB289 |
| | SEQ ID NO: 869 | I23RB290 |
| | SEQ ID NO: 873 | I23RB292 |
| DIVMTQSPDSLAVSLGERATINCKSSQSVLY | SEQ ID NO: 797 | I23RB6 |
| SSNNKNYLAWYQQKPGQPPKLLIYWASTRE | SEQ ID NO: 805 | I23RB10 |
| SGVPDRFSGSGSGTDFTLTISSLQAEDVAVY | | |
| YCQQYYSTPLTFGQGTKVEIK (SEQ ID | | |
| NO: 1249) | | |
| DIQMTQSPSSLSASVGDRVTITCRASQSISND | SEQ ID NO: 807 | I23RB259 |
| LNWYQQKPGKAPKLLIYAASSLQSGVPSRFS | SEQ ID NO: 881 | I23RB316 |
| GSGSGTDFTLTISSLQPEDFATYYCQQSYSTP | | |
| LTFGQGTKVEIK | | |
| (SEQ ID NO: 1250) | | |
| EIVLTQSPGTLSLSPGERATLSCRASQSVSSS | SEQ ID NO: 823 | I23RB267 |
| YLAWYQQKPGQAPRLLIYGASSRATGIPDRF | SEQ ID NO: 827 | I23RB269 |
| SGSGSGTDFTLTISRLEPEDFAVYYCQQYGS | SEQ ID NO: 833 | I23RB272 |
| SPLTFGQGTKVEIK | SEQ ID NO: 845 | I23RB278 |
| (SEQ ID NO: 1251) | SEQ ID NO: 849 | I23RB280 |
| | SEQ ID NO: 855 | I23RB283 |
| | SEQ ID NO: 863 | I23RB287 |
| | SEQ ID NO: 865 | I23RB288 |

TABLE 15
Shared Antibody Light Chain CDR1, CDR2 and CDR3 Amino Acid Sequences

| CDR1, CDR2 and CDR3 | Corresponding Identical | Antibodies Comprising |
|---|---|---|
| Sequence and Consensus | CDR Sequences and | CDR1, CDR2 and |
| SEQ ID | SEQ IDs | CDR3 Sequences |
| CDR1 QSVSSY (SEQ ID | SEQ ID NO: 903 | I23RB1 |
| NO: 1252) | SEQ ID NO: 909 | I23RB2 |
| | SEQ ID NO: 915 | I23RB3 |
| | SEQ ID NO: 921 | I23RB4 |
| | SEQ ID NO: 945 | I23RB8 |
| | SEQ ID NO: 951 | I23RB9 |
| | SEQ ID NO: 1017 | I23RB268 |
| | SEQ ID NO: 1029 | I23RB270 |
| | SEQ ID NO: 1155 | I23RB291 |
| CDR2 DAS (SEQ ID | SEQ ID NO: 904 | |
| NO: 1253) | SEQ ID NO: 910 | |
| | SEQ ID NO: 916 | |
| | SEQ ID NO: 922 | |
| | SEQ ID NO: 946 | |
| | SEQ ID NO: 952 | |
| | SEQ ID NO: 1018 | |
| | SEQ ID NO: 1030 | |
| | SEQ ID NO: 1156 | |
| CDR3 QQRSNWPLT (SEQ ID | SEQ ID NO: 905 | |
| NO: 1254) | SEQ ID NO: 911 | |
| | SEQ ID NO: 917 | |
| | SEQ ID NO: 923 | |
| | SEQ ID NO: 947 | |
| | SEQ ID NO: 953 | |
| | SEQ ID NO: 1019 | |
| | SEQ ID NO: 1031 | |
| | SEQ ID NO: 1157 | |
| CDR1 QSISSY (SEQ ID | SEQ ID NO: 927 | I23RB5 |
| NO: 1255) | SEQ ID NO: 1005 | I23RB266 |
| | SEQ ID NO: 1035 | I23RB271 |
| | SEQ ID NO: 1047 | I23RB273 |
| | SEQ ID NO: 1053 | I23RB274 |
| | SEQ ID NO: 1059 | I23RB275 |
| | SEQ ID NO: 1065 | I23RB276 |
| | SEQ ID NO: 1071 | I23RB277 |
| | SEQ ID NO: 1083 | I23RB279 |
| | SEQ ID NO: 1095 | I23RB281 |
| | SEQ ID NO: 1101 | I23RB282 |
| | SEQ ID NO: 1113 | I23RB284 |
| | SEQ ID NO: 1125 | I23RB286 |
| | SEQ ID NO: 1143 | I23RB289 |
| | SEQ ID NO: 1149 | I23RB290 |
| | SEQ ID NO: 1161 | I23RB292 |
| CDR2 AAS (SEQ ID | SEQ ID NO: 928 | |
| NO: 1256) | SEQ ID NO: 1006 | |
| | SEQ ID NO: 1036 | |
| | SEQ ID NO: 1048 | |
| | SEQ ID NO: 1054 | |
| | SEQ ID NO: 1060 | |
| | SEQ ID NO: 1066 | |
| | SEQ ID NO: 1072 | |
| | SEQ ID NO: 1084 | |
| | SEQ ID NO: 1096 | |
| | SEQ ID NO: 1102 | |
| | SEQ ID NO: 1114 | |
| | SEQ ID NO: 1126 | |
| | SEQ ID NO: 1144 | |
| | SEQ ID NO: 1150 | |
| | SEQ ID NO: 1162 | |
| CDR3 QQSYSTPLT (SEQ ID | SEQ ID NO: 929 | |
| NO: 1257) | SEQ ID NO: 1007 | |
| | SEQ ID NO: 1037 | |
| | SEQ ID NO: 1049 | |
| | SEQ ID NO: 1055 | |
| | SEQ ID NO: 1061 | |
| | SEQ ID NO: 1067 | |
| | SEQ ID NO: 1073 | |
| | SEQ ID NO: 1085 | |
| | SEQ ID NO: 1097 | |
| | SEQ ID NO: 1103 | |
| | SEQ ID NO: 1115 | |
| | SEQ ID NO: 1127 | |
| | SEQ ID NO: 1145 | |
| | SEQ ID NO: 1151 | |
| | SEQ ID NO: 1163 | |
| CDR1 QSVLYSSNNKNY | SEQ ID NO: 933 | I23RB6 |
| (SEQ ID NO: 1258) | SEQ ID NO: 957 | I23RB10 |
| CDR2 WAS (SEQ ID | SEQ ID NO: 934 | |
| NO: 1259) | SEQ ID NO: 958 | |
| CDR3 QQYYSTPLT (SEQ ID | SEQ ID NO: 935 | |
| NO: 1260) | SEQ ID NO: 959 | |
| CDR1 QSISND (SEQ ID | SEQ ID NO: 963 | I23RB259 |
| NO: 1261) | SEQ ID NO: 1185 | I23RB316 |
| CDR2 AAS (SEQ ID | SEQ ID NO: 964 | |
| NO: 1262) | SEQ ID NO: 1186 | |
| CDR3 QQSYSTPLT (SEQ ID | SEQ ID NO: 965 | |
| NO: 1263) | SEQ ID NO: 1187 | |
| CDR1 QSVSSSY (SEQ ID | SEQ ID NO: 1011 | I23RB267 |
| NO: 1264) | SEQ ID NO: 1023 | I23RB269 |
| | SEQ ID NO: 1041 | I23RB272 |
| | SEQ ID NO: 1077 | I23RB278 |
| | SEQ ID NO: 1089 | I23RB280 |
| | SEQ ID NO: 1107 | I23RB283 |
| | SEQ ID NO: 1131 | I23RB287 |
| | SEQ ID NO: 1137 | I23RB288 |
| CDR2 GAS (SEQ ID | SEQ ID NO: 1012 | |
| NO: 1265) | SEQ ID NO: 1024 | |
| | SEQ ID NO: 1042 | |
| | SEQ ID NO: 1078 | |
| | SEQ ID NO: 1090 | |
| | SEQ ID NO: 1108 | |
| | SEQ ID NO: 1132 | |
| | SEQ ID NO: 1138 | |
| CDR3 QQYGSSPLT (SEQ ID | SEQ ID NO: 1013 | |
| NO: 1266) | SEQ ID NO: 1025 | |
| | SEQ ID NO: 1043 | |
| | SEQ ID NO: 1079 | |
| | SEQ ID NO: 1091 | |
| | SEQ ID NO: 1109 | |
| | SEQ ID NO: 1133 | |
| | SEQ ID NO: 1139 | |

1. An isolated monoclonal antibody or antigen binding fragment thereof that binds human interleukin-23 receptor (IL-23R) on a mammalian cell, wherein the antibody or fragment comprises:
a. a VH comprising an HCDR1, an HCDR2, and an HCDR3 having an amino acid sequence of SEQ ID NOs:570, 571, and 572, respectively, and a VL comprising an LCDR1, an LCDR2, and an LCDR3 having an amino acid sequence of SEQ ID NOs:573, 574, and 575, respectively;
b. a VH comprising an HCDR1, an HCDR2, and an HCDR3 having an amino acid sequence of SEQ ID NOs:936, 937, and 938, respectively, and a VL comprising an LCDR1, an LCDR2, and an LCDR3 having an amino acid sequence of SEQ ID NOs:939, 940, and 941, respectively;
c. a VH comprising an HCDR1, an HCDR2, and an HCDR3 having an amino acid sequence of SEQ ID NOs:918, 919, and 920, respectively, and a VL comprising an LCDR1, an LCDR2, and an LCDR3 having an amino acid sequence of SEQ ID NOs:921, 922, and 923, respectively;
d. a VH comprising an HCDR1, an HCDR2, and an HCDR3 having an amino acid sequence of SEQ ID NOs:900, 901, and 902, respectively, and a VL comprising an LCDR1, an LCDR2, and an LCDR3 having an amino acid sequence of SEQ ID NOs:903, 904, and 905, respectively;
e. a VH comprising an HCDR1, an HCDR2, and an HCDR3 having an amino acid sequence of SEQ ID NOs:276, 277, and 278, respectively, and a VL comprising an LCDR1, an LCDR2, and an LCDR3 having an amino acid sequence of SEQ ID NOs:279, 280, and 281, respectively;
f. a VH comprising an HCDR1, an HCDR2, and an HCDR3 having an amino acid sequence of SEQ ID NOs:294, 295, and 296, respectively, and a VL comprising an LCDR1, an LCDR2, and an LCDR3 having an amino acid sequence of SEQ ID NOs:297, 298, and 299, respectively;
g. a VH comprising an HCDR1, an HCDR2, and an HCDR3 having an amino acid sequence of SEQ ID NOs:318, 319, and 320, respectively, and a VL comprising an LCDR1, an LCDR2, and an LCDR3 having an amino acid sequence of SEQ ID NOs:321, 322, and 323, respectively;
h. a VH comprising an HCDR1, an HCDR2, and an HCDR3 having an amino acid sequence of SEQ ID NOs:324, 325, and 326, respectively, and a VL comprising an LCDR1, an LCDR2, and an LCDR3 having an amino acid sequence of SEQ ID NOs:327, 328, and 329, respectively;
i. a VH comprising an HCDR1, an HCDR2, and an HCDR3 having an amino acid sequence of SEQ ID NOs:330, 331, and 332, respectively, and a VL comprising an LCDR1, an LCDR2, and an LCDR3 having an amino acid sequence of SEQ ID NOs:333, 334, and 335, respectively;
j. a VH comprising an HCDR1, an HCDR2, and an HCDR3 having an amino acid sequence of SEQ ID NOs:342, 343, and 344, respectively, and a VL comprising an LCDR1, an LCDR2, and an LCDR3 having an amino acid sequence of SEQ ID NOs:345, 346, and 347, respectively;
k. a VH comprising an HCDR1, an HCDR2, and an HCDR3 having an amino acid sequence of SEQ ID NOs:354, 355, and 356, respectively, and a VL comprising an LCDR1, an LCDR2, and an LCDR3 having an amino acid sequence of SEQ ID NOs:357, 358, and 359, respectively;
l. a VH comprising an HCDR1, an HCDR2, and an HCDR3 having an amino acid sequence of SEQ ID NOs:360, 361, and 362, respectively, and a VL comprising an LCDR1, an LCDR2, and an LCDR3 having an amino acid sequence of SEQ ID NOs:363, 364, and 365, respectively;
m. a VH comprising an HCDR1, an HCDR2, and an HCDR3 having an amino acid sequence of SEQ ID NOs:366, 367, and 368, respectively, and a VL comprising an LCDR1, an LCDR2, and an LCDR3 having an amino acid sequence of SEQ ID NOs:369, 370, and 371, respectively;
n. a VH comprising an HCDR1, an HCDR2, and an HCDR3 having an amino acid sequence of SEQ ID NOs:384, 385, and 386, respectively, and a VL comprising an LCDR1, an LCDR2, and an LCDR3 having an amino acid sequence of SEQ ID NOs:387, 388, and 389, respectively;
o. a VH comprising an HCDR1, an HCDR2, and an HCDR3 having an amino acid sequence of SEQ ID NOs:906, 907, and 908, respectively, and a VL comprising an LCDR1, an LCDR2, and an LCDR3 having an amino acid sequence of SEQ ID NOs:909, 910, and 911, respectively;
p. a VH comprising an HCDR1, an HCDR2, and an HCDR3 having an amino acid sequence of SEQ ID NOs:420, 421, and 422, respectively, and a VL comprising an LCDR1, an LCDR2, and an LCDR3 having an amino acid sequence of SEQ ID NOs:423, 424, and 425, respectively;
q. a VH comprising an HCDR1, an HCDR2, and an HCDR3 having an amino acid sequence of SEQ ID NOs:1026, 1027, and 1028, respectively, and a VL comprising an LCDR1, an LCDR2, and an LCDR3 having an amino acid sequence of SEQ ID NOs:1029, 1030, and 1031, respectively;
r. a VH comprising an HCDR1, an HCDR2, and an HCDR3 having an amino acid sequence of SEQ ID NOs:912, 913, and 914, respectively, and a VL comprising an LCDR1, an LCDR2, and an LCDR3 having an amino acid sequence of SEQ ID NOs:915, 916, and 917, respectively;
s. a VH comprising an HCDR1, an HCDR2, and an HCDR3 having an amino acid sequence of SEQ ID NOs:426, 427, and 428, respectively, and a VL comprising an LCDR1, an LCDR2, and an LCDR3 having an amino acid sequence of SEQ ID NOs:429, 430, and 431, respectively;
t. a VH comprising an HCDR1, an HCDR2, and an HCDR3 having an amino acid sequence of SEQ ID NOs:1194, 1195, and 1196, respectively, and a VL comprising an LCDR1, an LCDR2, and an LCDR3 having an amino acid sequence of SEQ ID NOs:1197, 1198, and 1199, respectively;
u. a VH comprising an HCDR1, an HCDR2, and an HCDR3 having an amino acid sequence of SEQ ID NOs:438, 439, and 440, respectively, and a VL comprising an LCDR1, an LCDR2, and an LCDR3 having an amino acid sequence of SEQ ID NOs:441, 442, and 443, respectively;
v. a VH comprising an HCDR1, an HCDR2, and an HCDR3 having an amino acid sequence of SEQ ID NOs:444, 445, and 446, respectively, and a VL comprising an LCDR1, an LCDR2, and an LCDR3 having an amino acid sequence of SEQ ID NOs:447, 448, and 449, respectively;
w. a VH comprising an HCDR1, an HCDR2, and an HCDR3 having an amino acid sequence of SEQ ID NOs:456, 457, and 458, respectively, and a VL comprising an LCDR1, an LCDR2, and an LCDR3 having an amino acid sequence of SEQ ID NOs:459, 460, and 461, respectively;
x. a VH comprising an HCDR1, an HCDR2, and an HCDR3 having an amino acid sequence of SEQ ID NOs:462, 463, and 464, respectively, and a VL comprising an LCDR1, an LCDR2, and an LCDR3 having an amino acid sequence of SEQ ID NOs:465, 466, and 467, respectively;
y. a VH comprising an HCDR1, an HCDR2, and an HCDR3 having an amino acid sequence of SEQ ID NOs:468, 469, and 470, respectively, and a VL comprising an LCDR1, an LCDR2, and an LCDR3 having an amino acid sequence of SEQ ID NOs:471, 472, and 473, respectively;
z. a VH comprising an HCDR1, an HCDR2, and an HCDR3 having an amino acid sequence of SEQ ID NOs:474, 475, and 476, respectively, and a VL comprising an LCDR1, an LCDR2, and an LCDR3 having an amino acid sequence of SEQ ID NOs:477, 478, and 479, respectively;
aa. a VH comprising an HCDR1, an HCDR2, and an HCDR3 having an amino acid sequence of SEQ ID NOs:480, 481, and 482, respectively, and a VL comprising an LCDR1, an LCDR2, and an LCDR3 having an amino acid sequence of SEQ ID NOs:483, 484, and 485, respectively;
bb. a VH comprising an HCDR1, an HCDR2, and an HCDR3 having an amino acid sequence of SEQ ID NOs:510, 511, and 512, respectively, and a VL comprising an LCDR1, an LCDR2, and an LCDR3 having an amino acid sequence of SEQ ID NOs:513, 514, and 515, respectively;
cc. a VH comprising an HCDR1, an HCDR2, and an HCDR3 having an amino acid sequence of SEQ ID NOs:528, 529, and 530, respectively, and a VL comprising an LCDR1, an LCDR2, and an LCDR3 having an amino acid sequence of SEQ ID NOs:531, 532, and 533, respectively;
dd. a VH comprising an HCDR1, an HCDR2, and an HCDR3 having an amino acid sequence of SEQ ID NOs:552, 553, and 554, respectively, and a VL comprising an LCDR1, an LCDR2, and an LCDR3 having an amino acid sequence of SEQ ID NOs:555, 556, and 557, respectively;
ee. a VH comprising an HCDR1, an HCDR2, and an HCDR3 having an amino acid sequence of SEQ ID NOs:558, 559, and 560, respectively, and a VL comprising an LCDR1, an LCDR2, and an LCDR3 having an amino acid sequence of SEQ ID NOs:561, 562, and 563, respectively;
ff. a VH comprising an HCDR1, an HCDR2, and an HCDR3 having an amino acid sequence of SEQ ID NOs:564, 565, and 566, respectively, and a VL comprising an LCDR1, an LCDR2, and an LCDR3 having an amino acid sequence of SEQ ID NOs:567, 568, and 569, respectively;
gg. a VH comprising an HCDR1, an HCDR2, and an HCDR3 having an amino acid sequence of SEQ ID NOs:576, 577, and 578, respectively, and a VL comprising an LCDR1, an LCDR2, and an LCDR3 having an amino acid sequence of SEQ ID NOs:579, 580, and 581, respectively;
hh. a VH comprising an HCDR1, an HCDR2, and an HCDR3 having an amino acid sequence of SEQ ID NOs:600, 601, and 602, respectively, and a VL comprising an LCDR1, an LCDR2, and an LCDR3 having an amino acid sequence of SEQ ID NOs:603, 604, and 605, respectively;
ii. a VH comprising an HCDR1, an HCDR2, and an HCDR3 having an amino acid sequence of SEQ ID NOs:606, 607, and 608, respectively, and a VL comprising an LCDR1, an LCDR2, and an LCDR3 having an amino acid sequence of SEQ ID NOs:609, 610, and 611, respectively;
jj. a VH comprising an HCDR1, an HCDR2, and an HCDR3 having an amino acid sequence of SEQ ID NOs:624, 625, and 626, respectively, and a VL comprising an LCDR1, an LCDR2, and an LCDR3 having an amino acid sequence of SEQ ID NOs:627, 628, and 629, respectively;
kk. a VH comprising an HCDR1, an HCDR2, and an HCDR3 having an amino acid sequence of SEQ ID NOs:642, 643, and 644, respectively, and a VL comprising an LCDR1, an LCDR2, and an LCDR3 having an amino acid sequence of SEQ ID NOs:645, 646, and 647, respectively;
ll. a VH comprising an HCDR1, an HCDR2, and an HCDR3 having an amino acid sequence of SEQ ID NOs:648, 649, and 650, respectively, and a VL comprising an LCDR1, an LCDR2, and an LCDR3 having an amino acid sequence of SEQ ID NOs:651, 652, and 653, respectively; or
mm. a VH comprising an HCDR1, an HCDR2, and an HCDR3 having an amino acid sequence of SEQ ID NOs:654, 655, and 656, respectively, and a VL comprising an LCDR1, an LCDR2, and an LCDR3 having an amino acid sequence of SEQ ID NOs:657, 658, and 659, respectively.

2. The isolated monoclonal antibody or antigen binding fragment thereof of claim 1 that binds human interleukin-23 receptor (IL-23R) on a mammalian cell, wherein the antibody or fragment comprises:
a. a VH comprising the amino acid sequence of SEQ ID NO:236, and a VL comprising the amino acid sequence of SEQ ID NO:237;
b. a VH comprising the amino acid sequence of SEQ ID NO:798, and a VL comprising the amino acid sequence of SEQ ID NO:799;
c. a VH comprising the amino acid sequence of SEQ ID NO:792, and a VL comprising the amino acid sequence of SEQ ID NO:793;
d. a VH comprising the amino acid sequence of SEQ ID NO:786, and a VL comprising the amino acid sequence of SEQ ID NO:787;
e. a VH comprising the amino acid sequence of SEQ ID NO:138, and a VL comprising the amino acid sequence of SEQ ID NO:139;
f. a VH comprising the amino acid sequence of SEQ ID NO:144, and a VL comprising the amino acid sequence of SEQ ID NO:145;
g. a VH comprising the amino acid sequence of SEQ ID NO:152, and a VL comprising the amino acid sequence of SEQ ID NO:153;
h. a VH comprising the amino acid sequence of SEQ ID NO:154, and a VL comprising the amino acid sequence of SEQ ID NO:155;
i. a VH comprising the amino acid sequence of SEQ ID NO:156, and a VL comprising the amino acid sequence of SEQ ID NO:157;
j. a VH comprising the amino acid sequence of SEQ ID NO:160, and a VL comprising the amino acid sequence of SEQ ID NO:161;
k. a VH comprising the amino acid sequence of SEQ ID NO:164, and a VL comprising the amino acid sequence of SEQ ID NO:165;
l. a VH comprising the amino acid sequence of SEQ ID NO:166, and a VL comprising the amino acid sequence of SEQ ID NO:167;
m. a VH comprising the amino acid sequence of SEQ ID NO:168, and a VL comprising the amino acid sequence of SEQ ID NO:169;
n. a VH comprising the amino acid sequence of SEQ ID NO:174, and a VL comprising the amino acid sequence of SEQ ID NO:175;
o. a VH comprising the amino acid sequence of SEQ ID NO:788, and a VL comprising the amino acid sequence of SEQ ID NO:789;
p. a VH comprising the amino acid sequence of SEQ ID NO:186, and a VL comprising the amino acid sequence of SEQ ID NO:187;
q. a VH comprising the amino acid sequence of SEQ ID NO:828, and a VL comprising the amino acid sequence of SEQ ID NO:829;
r. a VH comprising the amino acid sequence of SEQ ID NO:790, and a VL comprising the amino acid sequence of SEQ ID NO:791;
S. a VH comprising the amino acid sequence of SEQ ID NO:188, and a VL comprising the amino acid sequence of SEQ ID NO:189;
t. a VH comprising the amino acid sequence of SEQ ID NO:884, and a VL comprising the amino acid sequence of SEQ ID NO:885;
u. a VH comprising the amino acid sequence of SEQ ID NO:192, and a VL comprising the amino acid sequence of SEQ ID NO:193;
v. a VH comprising the amino acid sequence of SEQ ID NO:194, and a VL comprising the amino acid sequence of SEQ ID NO:195;
w. a VH comprising the amino acid sequence of SEQ ID NO:198, and a VL comprising the amino acid sequence of SEQ ID NO:199;
x. a VH comprising the amino acid sequence of SEQ ID NO:200, and a VL comprising the amino acid sequence of SEQ ID NO:201;
y. a VH comprising the amino acid sequence of SEQ ID NO:202, and a VL comprising the amino acid sequence of SEQ ID NO:203;
z. a VH comprising the amino acid sequence of SEQ ID NO:204, and a VL comprising the amino acid sequence of SEQ ID NO:205;
aa. a VH comprising the amino acid sequence of SEQ ID NO:206, and a VL comprising the amino acid sequence of SEQ ID NO:207;
bb. a VH comprising the amino acid sequence of SEQ ID NO:216, and a VL comprising the amino acid sequence of SEQ ID NO:217;
cc. a VH comprising the amino acid sequence of SEQ ID NO:222, and a VL comprising the amino acid sequence of SEQ ID NO:223;
dd. a VH comprising the amino acid sequence of SEQ ID NO:230, and a VL comprising the amino acid sequence of SEQ ID NO:231;
ee. a VH comprising the amino acid sequence of SEQ ID NO:232, and a VL comprising the amino acid sequence of SEQ ID NO:233;
ff. a VH comprising the amino acid sequence of SEQ ID NO:234, and a VL comprising the amino acid sequence of SEQ ID NO:235;
gg. a VH comprising the amino acid sequence of SEQ ID NO:238, and a VL comprising the amino acid sequence of SEQ ID NO:239;
hh. a VH comprising the amino acid sequence of SEQ ID NO:246, and a VL comprising the amino acid sequence of SEQ ID NO:247;
ii. a VH comprising the amino acid sequence of SEQ ID NO:248, and a VL comprising the amino acid sequence of SEQ ID NO:249;
jj. a VH comprising the amino acid sequence of SEQ ID NO:254, and a VL comprising the amino acid sequence of SEQ ID NO:255;
kk. a VH comprising the amino acid sequence of SEQ ID NO:260, and a VL comprising the amino acid sequence of SEQ ID NO:261;
ll. a VH comprising the amino acid sequence of SEQ ID NO:262, and a VL comprising the amino acid sequence of SEQ ID NO:263; or
mm. a VH comprising the amino acid sequence of SEQ ID NO:264, and a VL comprising the amino acid sequence of SEQ ID NO:265.

3. The isolated monoclonal antibody or antigen binding fragment thereof of claim 1 that binds human interleukin-23 receptor (IL-23R) on a mammalian cell, wherein the antibody or fragment comprises:
a. a VH comprising an HCDR1, and HCDR2 and an HCDR3 having an amino acid sequence of SEQ ID NOs:570, 571, and 572, respectively and a VL comprising an LCDR1, an LCDR2, and an LCDR3 having an amino acid sequence of SEQ ID NOs:573, 574, and 575, respectively;
b. a VH comprising an HCDR1, and HCDR2 and an HCDR3 having an amino acid sequence of SEQ ID NOs:936, 937, and 938, respectively and a VL comprising an LCDR1, an LCDR2, and an LCDR3 having an amino acid sequence of SEQ ID NOs:939, 940, and 941, respectively;
c. a VH comprising an HCDR1, and HCDR2 and an HCDR3 having an amino acid sequence of SEQ ID NOs:918, 919, and 920, respectively and a VL comprising an LCDR1, an LCDR2, and an LCDR3 having an amino acid sequence of SEQ ID NOs:921, 922, and 923, respectively;
d. a VH comprising an HCDR1, and HCDR2 and an HCDR3 having an amino acid sequence of SEQ ID NOs:900, 901, and 902, respectively and a VL comprising an LCDR1, an LCDR2, and an LCDR3 having an amino acid sequence of SEQ ID NOs:903, 904, and 905, respectively; or
e. a VH comprising an HCDR1, and HCDR2 and an HCDR3 having an amino acid sequence of SEQ ID NOs:912, 913, and 914, respectively and a VL comprising an LCDR1, an LCDR2, and an LCDR3 having an amino acid sequence of SEQ ID NOs:915, 916, and 917, respectively.

4. The isolated monoclonal antibody or antigen binding fragment thereof of claim 2 that binds human interleukin-23 receptor (IL-23R) on a mammalian cell, wherein the antibody or fragment comprises:
a. a VH comprising the amino acid sequence of SEQ ID NO:236, and a VL comprising the amino acid sequence of SEQ ID NO:237;
b. a VH comprising the amino acid sequence of SEQ ID NO:798, and a VL comprising the amino acid sequence of SEQ ID NO:799;
c. a VH comprising the amino acid sequence of SEQ ID NO:792, and a VL comprising the amino acid sequence of SEQ ID NO:793;
d. a VH comprising the amino acid sequence of SEQ ID NO:786, and a VL comprising the amino acid sequence of SEQ ID NO:787; or
e. a VH comprising the amino acid sequence of SEQ ID NO:790, and a VL comprising the amino acid sequence of SEQ ID NO:791.

5. (canceled)

6. (canceled)

7. An isolated monoclonal antibody or antigen binding fragment thereof which recognizes human and rat interleukin-23 receptor (IL-23R), wherein the antibody or fragment comprises:
a. a VH comprising an HCDR1, and HCDR2 and an HCDR3 having an amino acid sequence of SEQ ID NOs:468, 469, and 470, respectively and a VL comprising an LCDR1, an LCDR2, and an LCDR3 having an amino acid sequence of SEQ ID NOs:471, 472, and 473, respectively;
b. a VH comprising an HCDR1, and HCDR2 and an HCDR3 having an amino acid sequence of SEQ ID NOs:618, 619, and 620, respectively and a VL comprising an LCDR1, an LCDR2, and an LCDR3 having an amino acid sequence of SEQ ID NOs:621, 622, and 623, respectively;
c. a VH comprising an HCDR1, and HCDR2 and an HCDR3 having an amino acid sequence of SEQ ID NOs:330, 331, and 332, respectively and a VL comprising an LCDR1, an LCDR2, and an LCDR3 having an amino acid sequence of SEQ ID NOs:333, 334, and 335, respectively;
d. a VH comprising an HCDR1, and HCDR2 and an HCDR3 having an amino acid sequence of SEQ ID NOs:936,937, and 938, respectively and a VL comprising an LCDR1, an LCDR2, and an LCDR3 having an amino acid sequence of SEQ ID NOs:939, 940, and 941, respectively;
e. a VH comprising an HCDR1, and HCDR2 and an HCDR3 having an amino acid sequence of SEQ ID NOs:312, 313, and 314, respectively and a VL comprising an LCDR1, an LCDR2, and an LCDR3 having an amino acid sequence of SEQ ID NOs:315, 316, and 317, respectively;
f. a VH comprising an HCDR1, and HCDR2 and an HCDR3 having an amino acid sequence of SEQ ID NOs:474, 475, and 476, respectively and a VL comprising an LCDR1, an LCDR2, and an LCDR3 having an amino acid sequence of SEQ ID NOs:477, 478, and 479, respectively;
g. a VH comprising an HCDR1, and HCDR2 and an HCDR3 having an amino acid sequence of SEQ ID NOs:1194, 1195, and 1196, respectively and a VL comprising an LCDR1, an LCDR2, and an LCDR3 having an amino acid sequence of SEQ ID NOs:1197, 1198, and 1199,
h. a VH comprising an HCDR1, and HCDR2 and an HCDR3 having an amino acid sequence of SEQ ID NOs:426, 427, and 428, respectively and a VL comprising an LCDR1, an LCDR2, and an LCDR3 having an amino acid sequence of SEQ ID NOs:429, 430, and 431, respectively; or
i. a VH comprising an HCDR1, and HCDR2 and an HCDR3 having an amino acid sequence of SEQ ID NOs:498, 499, and 500, respectively and a VL comprising an LCDR1, an LCDR2, and an LCDR3 having an amino acid sequence of SEQ ID NOs:501, 502, and 503, respectively.

8. The isolated monoclonal antibody or antigen binding fragment thereof of claim 7 which recognizes human and rat interleukin-23 receptor (IL-23R), wherein the antibody or fragment comprises:
a. a VH comprising the amino acid sequence of SEQ ID NO:202, and a VL comprising the amino acid sequence of SEQ ID NO:203;
b. a VH comprising the amino acid sequence of SEQ ID NO:252, and a VL comprising the amino acid sequence of SEQ ID NO:253;
c. a VH comprising the amino acid sequence of SEQ ID NO:156, and a VL comprising the amino acid sequence of SEQ ID NO:157;
d. a VH comprising the amino acid sequence of SEQ ID NO:798, and a VL comprising the amino acid sequence of SEQ ID NO:799;
e. a VH comprising the amino acid sequence of SEQ ID NO:150, and a VL comprising the amino acid sequence of SEQ ID NO:151;
f. a VH comprising the amino acid sequence of SEQ ID NO:204, and a VL comprising the amino acid sequence of SEQ ID NO:205;
g. a VH comprising the amino acid sequence of SEQ ID NO:884, and a VL comprising the amino acid sequence of SEQ ID NO:885;
h. a VH comprising the amino acid sequence of SEQ ID NO:188, and a VL comprising the amino acid sequence of SEQ ID NO:189; or
i. a VH comprising the amino acid sequence of SEQ ID NO:212, and a VL comprising the amino acid sequence of SEQ ID NO:213.

9. An isolated monoclonal antibody or antigen binding fragment thereof that binds interleukin-23 receptor (IL-23R) comprising a VL comprising CDR sequences of an LCDR1 SEQ ID NO:1252, an LCDR2 SEQ ID NO:1253, and an LCDR3 SEQ ID NO:1254 and a VH comprising CDR sequences selected from:
a. an HCDR1 SEQ ID NO:900, an HCDR2 SEQ ID NO:901 and an HCDR3 SEQ ID NO:902;
b. an HCDR1 SEQ ID NO:906, an HCDR2 SEQ ID NO:907, and an HCDR3 SEQ ID NO:908;
c. an HCDR1 SEQ ID NO:912, an HCDR2 SEQ ID NO:913, and an HCDR3 SEQ ID NO:914;
d. an HCDR1 SEQ ID NO:918, an HCDR2 SEQ ID NO:919, and an HCDR3 SEQ ID NO:920;
e. an HCDR1 SEQ ID NO:942, an HCDR2 SEQ ID NO:943, and an HCDR3 SEQ ID NO:944;
f. an HCDR1 SEQ ID NO:948, an HCDR2 SEQ ID NO:949, and an HCDR3 SEQ ID NO:950;
g. an HCDR1 SEQ ID NO:1014, an HCDR2 SEQ ID NO:1015, and an HCDR3 SEQ ID NO:1016;
h. an HCDR1 SEQ ID NO:1026, an HCDR2 SEQ ID NO:1027, and an HCDR3 SEQ ID NO:1028; and
i. an HCDR1 SEQ ID NO:1152, an HCDR2 SEQ ID NO:1153, and an HCDR3 SEQ ID NO:1154.

10. The isolated monoclonal antibody or antigen binding fragment thereof of claim 9 comprising a VL comprising CDR sequences of an LCDR1 SEQ ID NO:1252, an LCDR2 SEQ ID NO:1253, and an LCDR3 SEQ ID NO:1254 or having the amino acid sequence SEQ ID NO:1247 and a VH sequence selected from SEQ ID NO:786, 788, 790, 792, 800, 802, 824, 828 and 870.

11-21. (canceled)

22. The antibody or fragment of claim 1, wherein the antibody is an IgG.

23. The antibody or fragment of claim 1, wherein the antibody is a humanized or chimeric antibody or fragment thereof.

24. The isolated antibody or fragment of claim 1 which is an antibody or fragment thereof wherein the isolated antibody is a form of an antibody F(ab′)2, scFv fragment, domain antibody, minibody, diabody, triabody or tetrabody.

25. (canceled)

26. (canceled)

27. (canceled)

28. (canceled)

29. A composition comprising the antibody of claim 1, and a pharmaceutically acceptable excipient.

30-44. (canceled)

45. A method of treating a disease or disorder in a subject, comprising administering to the subject the composition of claim 29, wherein the disease or disorder is an IL-23R associated disease or disorder.

46. The method according to claim 45, wherein the disease or disorder is selected from multiple sclerosis, asthma, rheumatoid arthritis, inflammation of the gut, inflammatory bowel diseases (IBDs), juvenile IBD, adolescent IBD, Crohn's disease, ulcerative colitis, Celiac disease (nontropical Sprue), microscopic colitis, collagenous colitis, eosinophilic gastroenteritis/esophagitis, colitis associated with radio- or chemo-therapy, colitis associated with disorders of innate immunity as in leukocyte adhesion deficiency-1, sarcoidosis, Systemic Lupus Erythematosus, ankylosing spondylitis (axial spondyloarthritis), psoriatic arthritis, psoriasis (e.g., plaque psoriasis, guttate psoriasis, inverse psoriasis, pustular psoriasis, Palmo-Plantar Pustulosis, psoriasis vulgaris, or erythrodermic psoriasis), atopic dermatitis, acne ectopica, enteropathy associated with seronegative arthropathies, chronic granulomatous disease, glycogen storage disease type 1b, Hermansky-Pudlak syndrome, Chediak-Higashi syndrome, Wiskott-Aldrich Syndrome, pouchitis, pouchitis resulting after proctocolectomy and ileoanal anastomosis, gastrointestinal cancer, pancreatitis, insulin-dependent diabetes mellitus, mastitis, cholecystitis, cholangitis, primary biliary cirrhosis, viral-associated enteropathy, pericholangitis, chronic bronchitis, chronic sinusitis, asthma, uveitis, or graft versus host disease.

47. (canceled)

48. (canceled)

The application's sequence listing, which the Patent Office published only in electronic form, follows.

SEQUENCE LISTING (1267 sequences)

SEQ ID NO: 1 - protein, 332 aa, Homo sapiens
  REGION 1..332: note = Description of sequence: human IL-23R ECD sequence
  REGION 1..332: note = Description of type of peptide: IL-23R extracellular domain sequences
GITNINCSGHIWVEPATIFKMGMNISIYCQAAIKNCQPRKLHFYKNGIKERFQITRINKTTARLWYKNFLEPHASMYCTAECPKHFQETLICGKDISSGYPPDIPDEVTCVIYEYSGNMTCTWNAGKLTYIDTKYVVHVKSLETEEEQQYLTSSYINISTDSLQGGKKYLVWVQAANALGMEESKQLQIHLDDIVIPSAAVISRAETINATVPKTIIYWDSQTTIEKVSCEMRYKATTNQTWNVKEFDTNFTYVQQSEFYLEPNIKYVFQVRCQETGKRYWQPWSSLFFHKTPETVPQVTSKAFQHDTWNSGLTVASISTGHLTSDNRGDIG

SEQ ID NO: 2 - protein, 451 aa, Mus musculus
  REGION 1..451: note = Description of sequence: I23RB101
  REGION 1..451: note = Description of type of peptide: Heavy Chain
EVQLQQSGAEVKKPGSSVKVSCKASGGTFSSYAISWVRQAPGQGLEWMGWINPNSGGTNYAQKFQGRVTMTRDTSISTAYMELSRLRSDDTAVYYCARGYRYGPLDGFDIWGQGTTLTVSSAKTTAPSVYPLAPVCGDTTGSSVTLGCLVKGYFPEPVTLTWNSGSLSSGVHTFPAVLQSDLYTLSSSVTVTSSTWPSQSITCNVAHPASSTKVDKKIEPRGPTIKPCPPCKCPAPNLLGGPSVFIFPPKIKDVLMISLSPIVTCVVVDVSEDDPDVQISWFVNNVEVHTAQTQTHREDYNSTLRVVSALPIQHQDWMSGKEFKCKVNNKDLPAPIERTISKPKGSVRAPQVYVLPPPEEEMTKKQVTLTCMVTDFMPEDIYVEWTNNGKTELNYKNTEPVLDSDGSYFMYSKLRVEKKNWVERNSYSCSVVHEGLHNHHTTKSFSRTPGK

SEQ ID NO: 3 - protein, 214 aa, Mus musculus
  REGION 1..214: note = Description of sequence: I23RB101
  REGION 1..214: note = Description of type of peptide: Light Chain
DIVMTQSHKFMSTSIGDRVSITCKTSQDVRTAVAWYQQKPGQSPKLLIYSASYRYIGVPDRFTGSGSGTDFTFTISDVQAEDLALYYCQQHYSTPYTFGGGTKLEIKRADAAPTVSIFPPSSEQLTSGGASVVCFLNNFYPKDINVKWKIDGSERQNGVLNSWTDQDSKDSTYSMSSTLTLTKDEYERHNSYTCEATHKTSTSPIVKSFNRNEC

SEQ ID NO: 4 - protein, 447 aa, Mus musculus
  REGION 1..447: note = Description of sequence: I23RB102
  REGION 1..447: note = Description of type of peptide: Heavy Chain
QVQLQQPGAELVKPGASVKVSCKASGYTFTKYWINWMNQRPGQGLEWIGNIYPGSISTNYNEKFKSKVTLTVDISSSTAYMQLSSLTSDDSAVYYCARGDFYALDYWGQGTTLTVSSAKTTAPSVYPLAPVCGDTTGSSVTLGCLVKGYFPEPVTLTWNSGSLSSGVHTFPAVLQSDLYTLSSSVTVTSSTWPSQSITCNVAHPASSTKVDKKIEPRGPTIKPCPPCKCPAPNLLGGPSVFIFPPKIKDVLMISLSPIVTCVVVDVSEDDPDVQISWFVNNVEVHTAQTQTHREDYNSTLRVVSALPIQHQDWMSGKEFKCKVNNKDLPAPIERTISKPKGSVRAPQVYVLPPPEEEMTKKQVTLTCMVTDFMPEDIYVEWTNNGKTELNYKNTEPVLDSDGSYFMYSKLRVEKKNWVERNSYSCSVVHEGLHNHHTTKSFSRTPGK

SEQ ID NO: 5 - protein, 214 aa, Mus musculus
  REGION 1..214: note = Description of sequence: I23RB102
  REGION 1..214: note = Description of type of peptide: Light Chain
DIQMTQSPASLSVSVGETVTITCRASENIYSHITWYQLKQGKSPQLLVYASTNLADDVPSRFSGSGSGTQYSLKINSLLSEDFGTYYCQHFWGTPWTFGGGTKLEMKRADAAPTVSIFPPSSEQLTSGGASVVCFLNNFYPKDINVKWKIDGSERQNGVLNSWTDQDSKDSTYSMSSTLTLTKDEYERHNSYTCEATHKTSTSPIVKSFNRNEC

SEQ ID NO: 6 - protein, 451 aa, Mus musculus
  REGION 1..451: note = Description of sequence: I23RB104
  REGION 1..451: note = Description of type of peptide: Heavy Chain
EVKLVESGGGLVKPGGSLKLSCAASGFTFSSYAMSWVRQTPEKRLDWVASISTGGSTYYPDSVKGGFTISRDIARNTLSLQMTSLRSEDTAMYYCARGPHYYGGSYPFAYWGQGTTLTVSSAKTTAPSVYPLAPVCGDTTGSSVTLGCLVKGYFPEPVTLTWNSGSLSSGVHTFPAVLQSDLYTLSSSVTVTSSTWPSQSITCNVAHPASSTKVDKKIEPRGPTIKPCPPCKCPAPNLLGGPSVFIFPPKIKDVLMISLSPIVTCVVVDVSEDDPDVQISWFVNNVEVHTAQTQTHREDYNSTLRVVSALPIQHQDWMSGKEFKCKVNNKDLPAPIERTISKPKGSVRAPQVYVLPPPEEEMTKKQVTLTCMVTDFMPEDIYVEWTNNGKTELNYKNTEPVLDSDGSYFMYSKLRVEKKNWVERNSYSCSVVHEGLHNHHTTKSFSRTPGK

SEQ ID NO: 7 - protein, 214 aa, Mus musculus
  REGION 1..214: note = Description of sequence: I23RB104
  REGION 1..214: note = Description of type of peptide: Light Chain
DIQMTQSPASLSVSVGETVTITCRASENIYSNLAWYQQKQGKSPQLLVYAATNLADGVPSRFSGSGSGTQYSLKINSLQSEDFGSYYCQHFWGTPPTFGSGTKLEIKRADAAPTVSIFPPSSEQLTSGGASVVCFLNNFYPKDINVKWKIDGSERQNGVLNSWTDQDSKDSTYSMSSTLTLTKDEYERHNSYTCEATHKTSTSPIVKSFNRNEC

SEQ ID NO: 8 - protein, 453 aa, Mus musculus
  REGION 1..453: note = Description of sequence: I23RB144
  REGION 1..453: note = Description of type of peptide: Heavy Chain
EVQLQQSGPELVKPGASVKMSCKASGYTFTSYIIHWVKQKPGQGLEWIGYIDPYNDDTKYNEKFKGKATLTSDKSSSTAYMEFSSLTSEDSAVYYCARLGSINYYDGSYFDYWGQGTSVTVSSAKTTAPSVYPLAPVCGDTTGSSVTLGCLVKGYFPEPVTLTWNSGSLSSGVHTFPAVLQSDLYTLSSSVTVTSSTWPSQSITCNVAHPASSTKVDKKIEPRGPTIKPCPPCKCPAPNLLGGPSVFIFPPKIKDVLMISLSPIVTCVVVDVSEDDPDVQISWFVNNVEVHTAQTQTHREDYNSTLRVVSALPIQHQDWMSGKEFKCKVNNKDLPAPIERTISKPKGSVRAPQVYVLPPPEEEMTKKQVTLTCMVTDFMPEDIYVEWTNNGKTELNYKNTEPVLDSDGSYFMYSKLRVEKKNWVERNSYSCSVVHEGLHNHHTTKSFSRTPGK

SEQ ID NO: 9 - protein, 219 aa, Mus musculus
  REGION 1..219: note = Description of sequence: I23RB144
  REGION 1..219: note = Description of type of peptide: Light Chain
DIVMTQSPLTLSVIIGQSASISCKSSQSLLDSDGKTYLNWLLQRPGQSPKRLMYLVSKLDSGVPDRFTGSGSGTDFTLKISRVEAEDLGVYYCWQGIHFPLTFGSGTRLEIKRADAAPTVSIFPPSSEQLTSGGASVVCFLNNFYPKDINVKWKIDGSERQNGVLNSWTDQDSKDSTYSMSSTLTLTKDEYERHNSYTCEATHKTSTSPIVKSFNRNEC

SEQ ID NO: 10 - protein, 448 aa, Mus musculus
  REGION 1..448: note = Description of sequence: I23RB148
  REGION 1..448: note = Description of type of peptide: Heavy Chain
DVQLQESGPDLVKPSQSLSLTCTVTGYSITSGYNWHWIRQFPGNKLEWMGYIHSSGTTNYSPSLRSRLSITRDTSKNQFFLQLNSVTTEDTATYYCTRQLGLKAMEYWGQGTTLTVSSAKTTAPSVYPLAPVCGDTTGSSVTLGCLVKGYFPEPVTLTWNSGSLSSGVHTFPAVLQSDLYTLSSSVTVTSSTWPSQSITCNVAHPASSTKVDKKIEPRGPTIKPCPPCKCPAPNLLGGPSVFIFPPKIKDVLMISLSPIVTCVVVDVSEDDPDVQISWFVNNVEVHTAQTQTHREDYNSTLRVVSALPIQHQDWMSGKEFKCKVNNKDLPAPIERTISKPKGSVRAPQVYVLPPPEEEMTKKQVTLTCMVTDFMPEDIYVEWTNNGKTELNYKNTEPVLDSDGSYFMYSKLRVEKKNWVERNSYSCSVVHEGLHNHHTTKSFSRTPGK

SEQ ID NO: 11 - protein, 214 aa, Mus musculus
  REGION 1..214: note = Description of sequence: I23RB148
  REGION 1..214: note = Description of type of peptide: Light Chain
DIVMTQSHKFMSTSVGDRVSLTCKASQEVRTAVAWYQQKPGQPPKLLIYSASYRYTGVPDRFTGSGSGTDFTFTIISVQAEDLAVYYCQQHYTTPYSFGSGTKLEIKRADAAPTVSIFPPSSEQLTSGGASVVCFLNNFYPKDINVKWKIDGSERQNGVLNSWTDQDSKDSTYSMSSTLTLTKDEYERHNSYTCEATHKTSTSPIVKSFNRNEC

SEQ ID NO: 12 - protein, 448 aa, Mus musculus
  REGION 1..448: note = Description of sequence: I23RB149
  REGION 1..448: note = Description of type of peptide: Heavy Chain
DVQLQESGPDLVKPSQSLSLTCTVTGYSITSGYNWHWIRQFPGNKLEWMGYIHFSDRTNYNPSLKSRISITRDTSKNQFFLQLNSVTSEDTATYYCSRQLGLKALDYWGQGTTLTVSSAKTTAPSVYPLAPVCGDTTGSSVTLGCLVKGYFPEPVTLTWNSGSLSSGVHTFPAVLQSDLYTLSSSVTVTSSTWPSQSITCNVAHPASSTKVDKKIEPRGPTIKPCPPCKCPAPNLLGGPSVFIFPPKIKDVLMISLSPIVTCVVVDVSEDDPDVQISWFVNNVEVHTAQTQTHREDYNSTLRVVSALPIQHQDWMSGKEFKCKVNNKDLPAPIERTISKPKGSVRAPQVYVLPPPEEEMTKKQVTLTCMVTDFMPEDIYVEWTNNGKTELNYKNTEPVLDSDGSYFMYSKLRVEKKNWVERNSYSCSVVHEGLHNHHTTKSFSRTPGK

SEQ ID NO: 13 - protein, 219 aa, Mus musculus
  REGION 1..219: note = Description of sequence: I23RB149
  REGION 1..219: note = Description of type of peptide: Light Chain
DVQMIQSPLSLPVSLGDQASISCRSSQSLVHSNGNTYLHWYLQKPGQSPKLLIYKVSNRFSGVPDRFSGSGSGTDFTLKISRVEAEDLGVYFCSQSTHVPLTFGAGTRLEIKRADAAPTVSIFPPSSEQLTSGGASVVCFLNNFYPKDINVKWKIDGSERQNGVLNSWTDQDSKDSTYSMSSTLTLTKDEYERHNSYTCEATHKTSTSPIVKSFNRNEC

SEQ ID NO: 14 - protein, 451 aa, Mus musculus
  REGION 1..451: note = Description of sequence: I23RB150
  REGION 1..451: note = Description of type of peptide: Heavy Chain
QIQLVQSGPELKKPGETVKISCKASAYTFTNYGMNWVKQAPGKGLKWMGWIKTNTGEPTYAEEFKGRFAFSLETSASTAYLQINNLKNEDTATYFCARSRQLGLRYYFDYWGQGTTLTVSSAKTTAPSVYPLAPVCGDTTGSSVTLGCLVKGYFPEPVTLTWNSGSLSSGVHTFPAVLQSDLYTLSSSVTVTSSTWPSQSITCNVAHPASSTKVDKKIEPRGPTIKPCPPCKCPAPNLLGGPSVFIFPPKIKDVLMISLSPIVTCVVVDVSEDDPDVQISWFVNNVEVHTAQTQTHREDYNSTLRVVSALPIQHQDWMSGKEFKCKVNNKDLPAPIERTISKPKGSVRAPQVYVLPPPEEEMTKKQVTLTCMVTDFMPEDIYVEWTNNGKTELNYKNTEPVLDSDGSYFMYSKLRVEKKNWVERNSYSCSVVHEGLHNHHTTKSFSRTPGK

SEQ ID NO: 15 - protein, 214 aa, Mus musculus
  REGION 1..214: note = Description of sequence: I23RB150
  REGION 1..214: note = Description of type of peptide: Light Chain
DIVMTQSHKFMSTSVGGRVSITCKASQDVSTAVAWYQQKPGQSPRLLIYSASYRYTGVPDRFTGSGSGTDFTFTISSVQAEDLAVFYCQQHYSTPYTFGSGTRLEIKRADAAPTVSIFPPSSEQLTSGGASVVCFLNNFYPKDINVKWKIDGSERQNGVLNSWTDQDSKDSTYSMSSTLTLTKDEYERHNSYTCEATHKTSTSPIVKSFNRNEC

SEQ ID NO: 16 - protein, 447 aa, Mus musculus
  REGION 1..447: note = Description of sequence: I23RB153
  REGION 1..447: note = Description of type of peptide: Heavy Chain
EVKLVESGGGLVQPGGSLKLSCAASGFTFSSDTMSWVRQTPEKRLELVAEISSNGGSTYHIDTVKGRFTISRDNAKNTLYLQMSSLKSEDTAMYYCASPGYPWFAYWGQGTTVTVSAAKTTAPSVYPLAPVCGDTTGSSVTLGCLVKGYFPEPVTLTWNSGSLSSGVHTFPAVLQSDLYTLSSSVTVTSSTWPSQSITCNVAHPASSTKVDKKIEPRGPTIKPCPPCKCPAPNLLGGPSVFIFPPKIKDVLMISLSPIVTCVVVDVSEDDPDVQISWFVNNVEVHTAQTQTHREDYNSTLRVVSALPIQHQDWMSGKEFKCKVNNKDLPAPIERTISKPKGSVRAPQVYVLPPPEEEMTKKQVTLTCMVTDFMPEDIYVEWTNNGKTELNYKNTEPVLDSDGSYFMYSKLRVEKKNWVERNSYSCSVVHEGLHNHHTTKSFSRTPGK

SEQ ID NO: 17 - protein, 214 aa, Mus musculus
  REGION 1..214: note = Description of sequence: I23RB153
  REGION 1..214: note = Description of type of peptide: Light Chain
DIVMTQSHRFMSTSVGERVSITCKASQDVGNAVAWYQQKPGQSPKLLIYWTSTRHNGVPDRFTGSGSGTDFTLTISNVQGEDLADYFCQQYNRYPLTFGSGTKLEIKRADAAPTVSIFPPSSEQLTSGGASVVCFLNNFYPKDINVKWKIDGSERQNGVLNSWTDQDSKDSTYSMSSTLTLTKDEYERHNSYTCEATHKTSTSPIVKSFNRNEC

SEQ ID NO: 18 - protein, 453 aa, Mus musculus
  REGION 1..453: note = Description of sequence: I23RB155
  REGION 1..453: note = Description of type of peptide: Heavy Chain
QVQLKESGPGLVKPSQSLSLTCSVTGYSITSGHSWNWIRQFPGNKLEWMGYISYDGTNDYNPSLKNRISITRDTSKNQFFLNLNSVTTEDTVTYYCARGGGYYGGTYRVFADWGQGTTLTVSSAKTTAPSVYPLAPVCGDTTGSSVTLGCLVKGYFPEPVTLTWNSGSLSSGVHTFPAVLQSDLYTLSSSVTVTSSTWPSQSITCNVAHPASSTKVDKKIEPRGPTIKPCPPCKCPAPNLLGGPSVFIFPPKIKDVLMISLSPIVTCVVVDVSEDDPDVQISWFVNNVEVHTAQTQTHREDYNSTLRVVSALPIQHQDWMSGKEFKCKVNNKDLPAPIERTISKPKGSVRAPQVYVLPPPEEEMTKKQVTLTCMVTDFMPEDIYVEWTNNGKTELNYKNTEPVLDSDGSYFMYSKLRVEKKNWVERNSYSCSVVHEGLHNHHTTKSFSRTPGK

SEQ ID NO: 19 - protein, 218 aa, Mus musculus
  REGION 1..218: note = Description of sequence: I23RB155
  REGION 1..218: note = Description of type of peptide: Light Chain
QIVLSQSPASLAVSLGQRATISCRTSESVDTYGNSFIYWYQQKPGQPPKLLIYRASNLESGIPARFSGSGSRTDFTLTINPVEADDVATYYCQQGNKDPYTFGSGTKLEMKRADAAPTVSIFPPSSEQLTSGGASVVCFLNNFYPKDINVKWKIDGSERQNGVLNSWTDQDSKDSTYSMSSTLTLTKDEYERHNSYTCEATHKTSTSPIVKSFNRNEC

SEQ ID NO: 20 - protein, 451 aa, Mus musculus
  REGION 1..451: note = Description of sequence: I23RB156
  REGION 1..451: note = Description of type of peptide: Heavy Chain
QVQLKESGPGLVAPSQSLSITCTVSGFSLTSYAINWVRQPPGKGLEWLGVIWTGGGTNYNSVFKSRLSISKDNSKSQIFLKMISLQTDDTARYYCARNRDYSNYRWYFDVWGAGTTLTVSSAKTTAPSVYPLAPVCGDTTGSSVTLGCLVKGYFPEPVTLTWNSGSLSSGVHTFPAVLQSDLYTLSSSVTVTSSTWPSQSITCNVAHPASSTKVDKKIEPRGPTIKPCPPCKCPAPNLLGGPSVFIFPPKIKDVLMISLSPIVTCVVVDVSEDDPDVQISWFVNNVEVHTAQTQTHREDYNSTLRVVSALPIQHQDWMSGKEFKCKVNNKDLPAPIERTISKPKGSVRAPQVYVLPPPEEEMTKKQVTLTCMVTDFMPEDIYVEWTNNGKTELNYKNTEPVLDSDGSYFMYSKLRVEKKNWVERNSYSCSVVHEGLHNHHTTKSFSRTPGK

SEQ ID NO: 21 - protein, 214 aa, Mus musculus
  REGION 1..214: note = Description of sequence: I23RB156
  REGION 1..214: note = Description of type of peptide: Light Chain
DIVMTQSHKFMSTSVGDRVSITCKASQDVSTAVAWYQQKPGRSPKLLIYSAFYRYTGVPDRFTGSGSGTDFTFTIGSVQAEDLAVYYCQQHYSIPLTFGAGTKLELKRADAAPTVSIFPPSSEQLTSGGASVVCFLNNFYPKDINVKWKIDGSERQNGVLNSWTDQDSKDSTYSMSSTLTLTKDEYERHNSYTCEATHKTSTSPIVKSFNRNEC

SEQ ID NO: 22 - protein, 452 aa, Mus musculus
  REGION 1..452: note = Description of sequence: I23RB157
  REGION 1..452: note = Description of type of peptide: Heavy Chain
EVKLVESGGGSVKPGGSLKLSCAASGFTFSRYTMSWVRQTPEKRLEWVAYISTGGGDTYYPDSVKGRFTISRDNARNTLYLQMSSLRSEDTAMYYCARRTSYSYYNYVFDYWGQGTTLTVSSAKTTAPSVYPLAPVCGDTTGSSVTLGCLVKGYFPEPVTLTWNSGSLSSGVHTFPAVLQSDLYTLSSSVTVTSSTWPSQSITCNVAHPASSTKVDKKIEPRGPTIKPCPPCKCPAPNLLGGPSVFIFPPKIKDVLMISLSPIVTCVVVDVSEDDPDVQISWFVNNVEVHTAQTQTHREDYNSTLRVVSALPIQHQDWMSGKEFKCKVNNKDLPAPIERTISKPKGSVRAPQVYVLPPPEEEMTKKQVTLTCMVTDFMPEDIYVEWTNNGKTELNYKNTEPVLDSDGSYFMYSKLRVEKKNWVERNSYSCSVVHEGLHNHHTTKSFSRTPGK

SEQ ID NO: 23 - protein, 218 aa, Mus musculus
  REGION 1..218: note = Description of sequence: I23RB157
  REGION 1..218: note = Description of type of peptide: Light Chain
DIVMTQSPASLAVSLGQRATISCRASESVDNYGISFMNWFQQKPGQPPKLLIYAASNQGSGVPARFSGSGSGTDFSLNIHPMEEDDTAMYFCQQSKEVPWTFGAGTKLELKRADAAPTVSIFPPSSEQLTSGGASVVCFLNNFYPKDINVKWKIDGSERQNGVLNSWTDQDSKDSTYSMSSTLTLTKDEYERHNSYTCEATHKTSTSPIVKSFNRNEC

SEQ ID NO: 24 - protein, 450 aa, Mus musculus
  REGION 1..450: note = Description of sequence: I23RB159
  REGION 1..450: note = Description of type of peptide: Heavy Chain
EVQLQQSGGGLVKPGGSLKLSCAASGFTFSDYGMAWVRQTPRKGPEWIAFISNLAYSVYYSDTVTGRFTISRENAKNTLYLEMSSLRSEDTAMYYCARHGDYRNYGFAYWGLGTTVTVSSAKTTAPSVYPLAPVCGDTTGSSVTLGCLVKGYFPEPVTLTWNSGSLSSGVHTFPAVLQSDLYTLSSSVTVTSSTWPSQSITCNVAHPASSTKVDKKIEPRGPTIKPCPPCKCPAPNLLGGPSVFIFPPKIKDVLMISLSPIVTCVVVDVSEDDPDVQISWFVNNVEVHTAQTQTHREDYNSTLRVVSALPIQHQDWMSGKEFKCKVNNKDLPAPIERTISKPKGSVRAPQVYVLPPPEEEMTKKQVTLTCMVTDFMPEDIYVEWTNNGKTELNYKNTEPVLDSDGSYFMYSKLRVEKKNWVERNSYSCSVVHEGLHNHHTTKSFSRTPGK

SEQ ID NO: 25 - protein, 214 aa, Mus musculus
  REGION 1..214: note = Description of sequence: I23RB159
  REGION 1..214: note = Description of type of peptide: Light Chain
DIVMTQTTSSLSASLGDRVTISCRASQDISNYLNWYQQKPDGTVKLLIYYTSRLHSGVPSRFSGSGSGTDYSLTISNLEQEDIATYFCQQGNTLPWTFGAGTKLELKRADAAPTVSIFPPSSEQLTSGGASVVCFLNNFYPKDINVKWKIDGSERQNGVLNSWTDQDSKDSTYSMSSTLTLTKDEYERHNSYTCEATHKTSTSPIVKSFNRNEC

SEQ ID NO: 26 - protein, 448 aa, Mus musculus
  REGION 1..448: note = Description of sequence: I23RB160
  REGION 1..448: note = Description of type of peptide: Heavy Chain
QVQLKESGPDLVKPSQSLSLTCTVTGYSITSGYNWHWIRQFPGNKLEWMGYIHYSSGTIYNPSLKSRISITRDTSKNQFFLQLNSVTTEDTGTYYCARQLGLKAMDYWGQGTSVTVSSAKTTAPSVYPLAPVCGDTTGSSVTLGCLVKGYFPEPVTLTWNSGSLSSGVHTFPAVLQSDLYTLSSSVTVTSSTWPSQSITCNVAHPASSTKVDKKIEPRGPTIKPCPPCKCPAPNLLGGPSVFIFPPKIKDVLMISLSPIVTCVVVDVSEDDPDVQISWFVNNVEVHTAQTQTHREDYNSTLRVVSALPIQHQDWMSGKEFKCKVNNKDLPAPIERTISKPKGSVRAPQVYVLPPPEEEMTKKQVTLTCMVTDFMPEDIYVEWTNNGKTELNYKNTEPVLDSDGSYFMYSKLRVEKKNWVERNSYSCSVVHEGLHNHHTTKSFSRTPGK

SEQ ID NO: 27 - protein, 214 aa, Mus musculus
  REGION 1..214: note = Description of sequence: I23RB160
  REGION 1..214: note = Description of type of peptide: Light Chain
DIVMTQSHKFMSTSVGDRVSITCKASQDVRTAVAWYQQKPGQSPKLLIHSASYRYTGVPDRFTGSGSGTDFTFTISSVQVEDLAVYYCQQHYTTPYTFGSGTKLEIKRADAAPTVSIFPPSSEQLTSGGASVVCFLNNFYPKDINVKWKIDGSERQNGVLNSWTDQDSKDSTYSMSSTLTLTKDEYERHNSYTCEATHKTSTSPIVKSFNRNEC

SEQ ID NO: 28 - protein, 449 aa, Mus musculus
  REGION 1..449: note = Description of sequence: I23RB161
  REGION 1..449: note = Description of type of peptide: Heavy Chain
EFQLQQSGPELVKPGASVKISCKASVYAFSSSWMNWVKQRPGKGLEWIGRIYPGDGDTNYNGKFKGKATLTADKSSSTAYMQLSSLTSEDSAVYFCARRYDFGSAMDYWGQGTSVTVSSAKTTAPSVYPLAPVCGDTTGSSVTLGCLVKGYFPEPVTLTWNSGSLSSGVHTFPAVLQSDLYTLSSSVTVTSSTWPSQSITCNVAHPASSTKVDKKIEPRGPTIKPCPPCKCPAPNLLGGPSVFIFPPKIKDVLMISLSPIVTCVVVDVSEDDPDVQISWFVNNVEVHTAQTQTHREDYNSTLRVVSALPIQHQDWMSGKEFKCKVNNKDLPAPIERTISKPKGSVRAPQVYVLPPPEEEMTKKQVTLTCMVTDFMPEDIYVEWTNNGKTELNYKNTEPVLDSDGSYFMYSKLRVEKKNWVERNSYSCSVVHEGLHNHHTTKSFSRTPGK

SEQ ID NO: 29 - protein, 213 aa, Mus musculus
  REGION 1..213: note = Description of sequence: I23RB161
  REGION 1..213: note = Description of type of peptide: Light Chain
DIVMTQSPAILSASPGEKVTMTCRASSSVSYMHWYQQKPGSSPKPWIYATSDLASGAPARFSGSGSGTSYSLTISRVEAEDAATYYCQQWSSNPPTFGGGTKLEIKRADAAPTVSIFPPSSEQLTSGGASVVCFLNNFYPKDINVKWKIDGSERQNGVLNSWTDQDSKDSTYSMSSTLTLTKDEYERHNSYTCEATHKTSTSPIVKSFNRNEC

SEQ ID NO: 30 - protein, 450 aa, Mus musculus
  REGION 1..450: note = Description of sequence: I23RB162
  REGION 1..450: note = Description of type of peptide: Heavy Chain
EFQLQQSGPELVKPGASVKMSCKASGYTFTNYVMHWVKQKPGQGLEWIGYINPYNDGTKYNEKFKGKATLTSDKSSSTAYMELSSLTSEDSAVYYCARSRTGTRWYFDVWGAGTTVTVSSAKTTAPSVYPLAPVCGDTTGSSVTLGCLVKGYFPEPVTLTWNSGSLSSGVHTFPAVLQSDLYTLSSSVTVTSSTWPSQSITCNVAHPASSTKVDKKIEPRGPTIKPCPPCKCPAPNLLGGPSVFIFPPKIKDVLMISLSPIVTCVVVDVSEDDPDVQISWFVNNVEVHTAQTQTHREDYNSTLRVVSALPIQHQDWMSGKEFKCKVNNKDLPAPIERTISKPKGSVRAPQVYVLPPPEEEMTKKQVTLTCMVTDFMPEDIYVEWTNNGKTELNYKNTEPVLDSDGSYFMYSKLRVEKKNWVERNSYSCSVVHEGLHNHHTTKSFSRTPGK

SEQ ID NO: 31 - protein, 214 aa, Mus musculus
  REGION 1..214: note = Description of sequence: I23RB162
  REGION 1..214: note = Description of type of peptide: Light Chain
DIVMTQSQKFMSTSVGDRVSVTCKASQNVGTNVAWYQQKPGQSPKALIYSASYRYSGVPDRFTGSGSGTDFTLTISNVQSEDLAEYFCQQYNSYPFTFGSGTKLEIKRADAAPTVSIFPPSSEQLTSGGASVVCFLNNFYPKDINVKWKIDGSERQNGVLNSWTDQDSKDSTYSMSSTLTLTKDEYERHNSYTCEATHKTSTSPIVKSFNRNEC

SEQ ID NO: 32 - protein, 448 aa, Mus musculus
  REGION 1..448: note = Description of sequence: I23RB165
  REGION 1..448: note = Description of type of peptide: Heavy Chain
EVQLQQSGAELVRPGASVKLSCTASGFNIKDSLMHWVKQRPEQGLEWIGWIDPEDGKTKYAPKFQDKATITADTSSNTAYLQLSSLTSEDTAIYYCARREVLDYFDYWGQGTTLTVSSAKTTAPSVYPLAPVCGDTTGSSVTLGCLVKGYFPEPVTLTWNSGSLSSGVHTFPAVLQSDLYTLSSSVTVTSSTWPSQSITCNVAHPASSTKVDKKIEPRGPTIKPCPPCKCPAPNLLGGPSVFIFPPKIKDVLMISLSPIVTCVVVDVSEDDPDVQISWFVNNVEVHTAQTQTHREDYNSTLRVVSALPIQHQDWMSGKEFKCKVNNKDLPAPIERTISKPKGSVRAPQVYVLPPPEEEMTKKQVTLTCMVTDFMPEDIYVEWTNNGKTELNYKNTEPVLDSDGSYFMYSKLRVEKKNWVERNSYSCSVVHEGLHNHHTTKSFSRTPGK

SEQ ID NO: 33 - protein, 218 aa, Mus musculus
  REGION 1..218: note = Description of sequence: I23RB165
  REGION 1..218: note = Description of type of peptide: Light Chain
DIVMTQSPASLAVSLGQRATISCRASKSVSTSGYSYMHWYQQKPGQPPKLLIYLASNLESGVPARFSGSGSGTDFTLNIHPVEEEDAATYYCQHSRELPLTFGAGTKLEMKRADAAPTVSIFPPSSEQLTSGGASVVCFLNNFYPKDINVKWKIDGSERQNGVLNSWTDQDSKDSTYSMSSTLTLTKDEYERHNSYTCEATHKTSTSPIVKSFNRNEC

SEQ ID NO: 34 - protein, 452 aa, Mus musculus
  REGION 1..452: note = Description of sequence: I23RB166
  REGION 1..452: note = Description of type of peptide: Heavy Chain
DVQLQESGPGLVKPSQTVSLTCTVTGYSITNGNHWWNWIRQVSGSKLEWIGYIRSSGSTDSNPSLKSRISITRDTSKNQLFLQLNSVTAEDIATYYCARERLRLRWSYFDYWGQGTTLTVSSAKTTAPSVYPLAPVCGDTTGSSVTLGCLVKGYFPEPVTLTWNSGSLSSGVHTFPAVLQSDLYTLSSSVTVTSSTWPSQSITCNVAHPASSTKVDKKIEPRGPTIKPCPPCKCPAPNLLGGPSVFIFPPKIKDVLMISLSPIVTCVVVDVSEDDPDVQISWFVNNVEVHTAQTQTHREDYNSTLRVVSALPIQHQDWMSGKEFKCKVNNKDLPAPIERTISKPKGSVRAPQVYVLPPPEEEMTKKQVTLTCMVTDFMPEDIYVEWTNNGKTELNYKNTEPVLDSDGSYFMYSKLRVEKKNWVERNSYSCSVVHEGLHNHHTTKSFSRTPGK

SEQ ID NO: 35 - protein, 214 aa, Mus musculus
  REGION 1..214: note = Description of sequence: I23RB166
  REGION 1..214: note = Description of type of peptide: Light Chain
DIVMTQSHKFMSTSVGARVSITCKASQDVSTAVAWYQQKPGQSPKLLIYSASYRYTGVPDRFTGSGSGTDFTFTISSVQAEDLAVYYCQQHYSTPRTFGGGTKLEIKRADAAPTVSIFPPSSEQLTSGGASVVCFLNNFYPKDINVKWKIDGSERQNGVLNSWTDQDSKDSTYSMSSTLTLTKDEYERHNSYTCEATHKTSTSPIVKSFNRNEC

SEQ ID NO: 36 - protein, 447 aa, Mus musculus
  REGION 1..447: note = Description of sequence: I23RB168
  REGION 1..447: note = Description of type of peptide: Heavy Chain
QIQLVQSGPELVKPGASVKMSCKTSGYTFTDYYINWVKQRPGQGLEWIGWIYPAINNTNYNEKFKGKATLTVDTSSRTAYMQLNSLTSEDSAVYFCAISRKPYFDYWGQGTTLTVSSAKTTAPSVYPLAPVCGDTTGSSVTLGCLVKGYFPEPVTLTWNSGSLSSGVHTFPAVLQSDLYTLSSSVTVTSSTWPSQSITCNVAHPASSTKVDKKIEPRGPTIKPCPPCKCPAPNLLGGPSVFIFPPKIKDVLMISLSPIVTCVVVDVSEDDPDVQISWFVNNVEVHTAQTQTHREDYNSTLRVVSALPIQHQDWMSGKEFKCKVNNKDLPAPIERTISKPKGSVRAPQVYVLPPPEEEMTKKQVTLTCMVTDFMPEDIYVEWTNNGKTELNYKNTEPVLDSDGSYFMYSKLRVEKKNWVERNSYSCSVVHEGLHNHHTTKSFSRTPGK

SEQ ID NO: 37 - protein, 214 aa, Mus musculus
  REGION 1..214: note = Description of sequence: I23RB168
  REGION 1..214: note = Description of type of peptide: Light Chain
DIQMTQSSSSFSVSLGDRVTITCKASEDLYNRLAWYQQKPGNAPRLLISGATSLGTGVLSRFSGSGSGKDYTLSITSLQTEDVATYYCQQYWSIPWTFGAGTKLELKRADAAPTVSIFPPSSEQLTSGGASVVCFLNNFYPKDINVKWKIDGSERQNGVLNSWTDQDSKDSTYSMSSTLTLTKDEYERHNSYTCEATHKTSTSPIVKSFNRNEC

SEQ ID NO: 38 - protein, 449 aa, Mus musculus
  REGION 1..449: note = Description of sequence: I23RB169
  REGION 1..449: note = Description of type of peptide: Heavy Chain
QIQLVQSGPELKKPGETVKISCKASGYTFTTVGMQWVQKMPGKGFKWIGWINTHSGEPKYTDDFKGRFAFSLETSASTAYLQISNLKSEDTATYFCARSSALTGAFAYWGQGTLVTVSSAKTTAPSVYPLAPVCGDTTGSSVTLGCLVKGYFPEPVTLTWNSGSLSSGVHTFPAVLQSDLYTLSSSVTVTSSTWPSQSITCNVAHPASSTKVDKKIEPRGPTIKPCPPCKCPAPNLLGGPSVFIFPPKIKDVLMISLSPIVTCVVVDVSEDDPDVQISWFVNNVEVHTAQTQTHREDYNSTLRVVSALPIQHQDWMSGKEFKCKVNNKDLPAPIERTISKPKGSVRAPQVYVLPPPEEEMTKKQVTLTCMVTDFMPEDIYVEWTNNGKTELNYKNTEPVLDSDGSYFMYSKLRVEKKNWVERNSYSCSVVHEGLHNHHTTKSFSRTPGK

SEQ ID NO: 39 - protein, 218 aa, Mus musculus
  REGION 1..218: note = Description of sequence: I23RB169
  REGION 1..218: note = Description of type of peptide: Light Chain
DIKMTQSPASLAVSLGQRATISCRASKSVSTSDYSYMHWYQQKPGQPPKLLIYLASNLESGVPARFSGSGSGTDFTLNIHPVEEEDAATYYCQHSRELPRTFGAGTKLELKRADAAPTVSIFPPSSEQLTSGGASVVCFLNNFYPKDINVKWKIDGSERQNGVLNSWTDQDSKDSTYSMSSTLTLTKDEYERHNSYTCEATHKTSTSPIVKSFNRNEC

SEQ ID NO: 40 - protein, 451 aa, Mus musculus
  REGION 1..451: note = Description of sequence: I23RB173
  REGION 1..451: note = Description of type of peptide: Heavy Chain
DVQLQESGPGLVKPSQSLSLTCSVTGYSITSGYYWNWIRQFPGNKLEWMGYISYDGGNNYNPSLKNRISITRDTSKNQFFLKLNSVTTEDTATYYCARDAGLLPYYAMDYWGQGTTLTVSSAKTTAPSVYPLAPVCGDTTGSSVTLGCLVKGYFPEPVTLTWNSGSLSSGVHTFPAVLQSDLYTLSSSVTVTSSTWPSQSITCNVAHPASSTKVDKKIEPRGPTIKPCPPCKCPAPNLLGGPSVFIFPPKIKDVLMISLSPIVTCVVVDVSEDDPDVQISWFVNNVEVHTAQTQTHREDYNSTLRVVSALPIQHQDWMSGKEFKCKVNNKDLPAPIERTISKPKGSVRAPQVYVLPPPEEEMTKKQVTLTCMVTDFMPEDIYVEWTNNGKTELNYKNTEPVLDSDGSYFMYSKLRVEKKNWVERNSYSCSVVHEGLHNHHTTKSFSRTPGK

SEQ ID NO: 41 - protein, 213 aa, Mus musculus
  REGION 1..213: note = Description of sequence: I23RB173
  REGION 1..213: note = Description of type of peptide: Light Chain
DIKMTQSPAIMSASPGEKVTITCSASSSVSYMHWFQQKPGTSPKLWIYSTSNLASGVPARFSGSGSGTSYSLTISRMEAEDAATYYCQQRSSYPLTFGDGTKLEMKRADAAPTVSIFPPSSEQLTSGGASVVCFLNNFYPKDINVKWKIDGSERQNGVLNSWTDQDSKDSTYSMSSTLTLTKDEYERHNSYTCEATHKTSTSPIVKSFNRNEC

SEQ ID NO: 42 - protein, 446 aa, Mus musculus
  REGION 1..446: note = Description of sequence: I23RB177
  REGION 1..446: note = Description of type of peptide: Heavy Chain
EVQLQQSGPELLKPGASVKISCKASGYTITDYTMHWVKQSHGKSLEWIGGINPNYGGTSYNEKFKDKATLTVDKSSSTAYMELRSLTSEDSAVFYCVRGNIYFDYWGQGTTLTVSSAKTTAPSVYPLAPVCGDTTGSSVTLGCLVKGYFPEPVTLTWNSGSLSSGVHTFPAVLQSDLYTLSSSVTVTSSTWPSQSITCNVAHPASSTKVDKKIEPRGPTIKPCPPCKCPAPNLLGGPSVFIFPPKIKDVLMISLSPIVTCVVVDVSEDDPDVQISWFVNNVEVHTAQTQTHREDYNSTLRVVSALPIQHQDWMSGKEFKCKVNNKDLPAPIERTISKPKGSVRAPQVYVLPPPEEEMTKKQVTLTCMVTDFMPEDIYVEWTNNGKTELNYKNTEPVLDSDGSYFMYSKLRVEKKNWVERNSYSCSVVHEGLHNHHTTKSFSRTPGK

SEQ ID NO: 43 - protein, 214 aa, Mus musculus
  REGION 1..214: note = Description of sequence: I23RB177
  REGION 1..214: note = Description of type of peptide: Light Chain
NTQMTQSPSSMYASLGERVTITCKASQDINSYLSWFQQKPGKSPKALIYRANRLVDGVPSRFSGSGSGQDYSLTISSLEYEDMGIYYCQQYDEFPRTFGAGTKLELKRADAAPTVSIFPPSSEQLTSGGASVVCFLNNFYPKDINVKWKIDGSERQNGVLNSWTDQDSKDSTYSMSSTLTLTKDEYERHNSYTCEATHKTSTSPIVKSFNRNEC

SEQ ID NO: 44 - protein, 450 aa, Mus musculus
  REGION 1..450: note = Description of sequence: I23RB180
  REGION 1..450: note = Description of type of peptide: Heavy Chain
QVTLKESGPGILQPSQTLSLTCSFSGFSLSTYGMGVGWIRQPSGKGLEWLANIWWNDSKYHNAALKSRLTISKDTSKNQVFLKIASVDTADTATYYCGRIDGYYECVDVWGTGTSVTVSSAKTTAPSVYPLAPVCGDTTGSSVTLGCLVKGYFPEPVTLTWNSGSLSSGVHTFPAVLQSDLYTLSSSVTVTSSTWPSQSITCNVAHPASSTKVDKKIEPRGPTIKPCPPCKCPAPNLLGGPSVFIFPPKIKDVLMISLSPIVTCVVVDVSEDDPDVQISWFVNNVEVHTAQTQTHREDYNSTLRVVSALPIQHQDWMSGKEFKCKVNNKDLPAPIERTISKPKGSVRAPQVYVLPPPEEEMTKKQVTLTCMVTDFMPEDIYVEWTNNGKTELNYKNTEPVLDSDGSYFMYSKLRVEKKNWVERNSYSCSVVHEGLHNHHTTKSFSRTPGK

SEQ ID NO: 45 - protein, 216 aa, Mus musculus
  REGION 1..216: note = Description of sequence: I23RB180
  REGION 1..216: note = Description of type of peptide: Light Chain
DIQMTQSPASLSASVGETVTITCRASVNIHNYLAWYQQKQGKSPQLLVYNAKTLADGVPSRFSGSGSGTQYSLKINSLQPEDFGSYYCQHFWTTPYMYTFGAGTKLELKRADAAPTVSIFPPSSEQLTSGGASVVCFLNNFYPKDINVKWKIDGSERQNGVLNSWTDQDSKDSTYSMSSTLTLTKDEYERHNSYTCEATHKTSTSPIVKSFNRNEC

SEQ ID NO: 46 - protein, 447 aa, Mus musculus
  REGION 1..447: note = Description of sequence: I23RB182
  REGION 1..447: note = Description of type of peptide: Heavy Chain
EVQLQQSGPGLVKPSQSLSLTCSVTGYSITSGYFWNWLRQFPGSKLEWMGFIDNDGSNDYNPSLKNRISITRDTSKNQFFLRLNSVTTEDTATYYCARGRLGFFDSWGPGTTLTVSSAKTTAPSVYPLAPVCGDTTGSSVTLGCLVKGYFPEPVTLTWNSGSLSSGVHTFPAVLQSDLYTLSSSVTVTSSTWPSQSITCNVAHPASSTKVDKKIEPRGPTIKPCPPCKCPAPNLLGGPSVFIFPPKIKDVLMISLSPIVTCVVVDVSEDDPDVQISWFVNNVEVHTAQTQTHREDYNSTLRVVSALPIQHQDWMSGKEFKCKVNNKDLPAPIERTISKPKGSVRAPQVYVLPPPEEEMTKKQVTLTCMVTDFMPEDIYVEWTNNGKTELNYKNTEPVLDSDGSYFMYSKLRVEKKNWVERNSYSCSVVHEGLHNHHTTKSFSRTPGK

SEQ ID NO: 47 - protein, 213 aa, Mus musculus
  REGION 1..213: note = Description of sequence: I23RB182
  REGION 1..213: note = Description of type of peptide: Light Chain
DIVMTQSPAIMSASLGEKVTMSCRASSSVNYMYWYQQKSDASPKLWIYYTSNLAPGVPARFSGSGSGNSYSLTISSMEGEDAATYYCQQFTNSPWTFGAGTKLELKRADAAPTVSIFPPSSEQLTSGGASVVCFLNNFYPKDINVKWKIDGSERQNGVLNSWTDQDSKDSTYSMSSTLTLTKDEYERHNSYTCEATHKTSTSPIVKSFNRNEC

SEQ ID NO: 48 - protein, 451 aa, Mus musculus
  REGION 1..451: note = Description of sequence: I23RB188
  REGION 1..451: note = Description of type of peptide: Heavy Chain
QIQLVQSGPELKKPGETVKISCKASGYTFTNYGMNWVKQAPGKGLKWMGWINTYTGAPTYADDFKGRFAFSLETSASTAYLQINNFKNEDTATYFCARGNGYPYYYGINYWGQGTSVTVSSAKTTAPSVYPLAPVCGDTTGSSVTLGCLVKGYFPEPVTLTWNSGSLSSGVHTFPAVLQSDLYTLSSSVTVTSSTWPSQSITCNVAHPASSTKVDKKIEPRGPTIKPCPPCKCPAPNLLGGPSVFIFPPKIKDVLMISLSPIVTCVVVDVSEDDPDVQISWFVNNVEVHTAQTQTHREDYNSTLRVVSALPIQHQDWMSGKEFKCKVNNKDLPAPIERTISKPKGSVRAPQVYVLPPPEEEMTKKQVTLTCMVTDFMPEDIYVEWTNNGKTELNYKNTEPVLDSDGSYFMYSKLRVEKKNWVERNSYSCSVVHEGLHNHHTTKSFSRTPGK

SEQ ID NO: 49 - protein, 214 aa, Mus musculus
  REGION 1..214: note = Description of sequence: I23RB188
  REGION 1..214: note = Description of type of peptide: Light Chain
DVQMIQSPSSLSASLGERVSLTCRASQEISGNLSWLQQKPDGTIKRLIYAASTLDSGVPKRFSGSRSGSDYSLTISSLESEDFADYYCLQYASYPWTFGAGTRLEIKRADAAPTVSIFPPSSEQLTSGGASVVCFLNNFYPKDINVKWKIDGSERQNGVLNSWTDQDSKDSTYSMSSTLTLTKDEYERHNSYTCEATHKTSTSPIVKSFNRNEC

SEQ ID NO: 50 - protein, 448 aa, Mus musculus; identical to SEQ ID NO: 10
  REGION 1..448: note = Description of sequence: I23RB189
  REGION 1..448: note = Description of type of peptide: Heavy Chain

SEQ ID NO: 51 - protein, 214 aa, Mus musculus
  REGION 1..214: note = Description of sequence: I23RB189
  REGION 1..214: note = Description of type of peptide: Light Chain
DIVLTQSPKSMSMSVGERVTLSCKASENVGTYVSWYQQKPEQSPKLLMYGASNRYTGVPDRFTGSGSATDFTLTISSVQAEDLADYHCGQSYSYPPTFGGGTKLEIKRADAAPTVSIFPPSSEQLTSGGASVVCFLNNFYPKDINVKWKIDGSERQNGVLNSWTDQDSKDSTYSMSSTLTLTKDEYERHNSYTCEATHKTSTSPIVKSFNRNEC

SEQ ID NO: 52 - protein, 447 aa, Mus musculus
  REGION 1..447: note = Description of sequence: I23RB27
  REGION 1..447: note = Description of type of peptide: Heavy Chain
QVQLKESGPDLVQPSQTLSLTCTVSGFSLTSYGVHWVRQPPGKGLEWVGTLGWDDKKSYNSALKSRLSISRDTSKSQVFLKLSSLQTEDTAMYYCTKEDVSYAMDFWGQGTTLTVSSAKTTAPSVYPLAPVCGDTTGSSVTLGCLVKGYFPEPVTLTWNSGSLSSGVHTFPAVLQSDLYTLSSSVTVTSSTWPSQSITCNVAHPASSTKVDKKIEPRGPTIKPCPPCKCPAPNLLGGPSVFIFPPKIKDVLMISLSPIVTCVVVDVSEDDPDVQISWFVNNVEVHTAQTQTHREDYNSTLRVVSALPIQHQDWMSGKEFKCKVNNKDLPAPIERTISKPKGSVRAPQVYVLPPPEEEMTKKQVTLTCMVTDFMPEDIYVEWTNNGKTELNYKNTEPVLDSDGSYFMYSKLRVEKKNWVERNSYSCSVVHEGLHNHHTTKSFSRTPGK

SEQ ID NO: 53 - protein, 218 aa, Mus musculus
  REGION 1..218: note = Description of sequence: I23RB27
  REGION 1..218: note = Description of type of peptide: Light Chain
DIQMTQSPTSLAVSLGQRATISCRASESVEYYGTSLMHWYQQKPGQPPKLLIYAASNVESGVPARFSGSGSGTDFSLNIHPVEEEDIAMYFCQQGKKVPWTFGAGTKLEMKRADAAPTVSIFPPSSEQLTSGGASVVCFLNNFYPKDINVKWKIDGSERQNGVLNSWTDQDSKDSTYSMSSTLTLTKDEYERHNSYTCEATHKTSTSPIVKSFNRNEC

SEQ ID NO: 54 - protein, 450 aa, Mus musculus
  REGION 1..450: note = Description of sequence: I23RB30
  REGION 1..450: note = Description of type of peptide: Heavy Chain
QVTLKESGPGILQPSQTLSLTCSFSGFSLSTSGMGVSWIRQPSGKGLEWLAHIYWDDDKRYNPSLKSRLTISKDTSSNQIFLKITSVDTADTATYYCARRTLGGPPFDYWGQGTTLTVSSAKTTAPSVYPLAPVCGDTTGSSVTLGCLVKGYFPEPVTLTWNSGSLSSGVHTFPAVLQSDLYTLSSSVTVTSSTWPSQSITCNVAHPASSTKVDKKIEPRGPTIKPCPPCKCPAPNLLGGPSVFIFPPKIKDVLMISLSPIVTCVVVDVSEDDPDVQISWFVNNVEVHTAQTQTHREDYNSTLRVVSALPIQHQDWMSGKEFKCKVNNKDLPAPIERTISKPKGSVRAPQVYVLPPPEEEMTKKQVTLTCMVTDFMPEDIYVEWTNNGKTELNYKNTEPVLDSDGSYFMYSKLRVEKKNWVERNSYSCSVVHEGLHNHHTTKSFSRTPGK

SEQ ID NO: 55 - protein, 214 aa, Mus musculus
  REGION 1..214: note = Description of sequence: I23RB30
  REGION 1..214: note = Description of type of peptide: Light Chain
DIVLTQSQRFMSTSVGDRVSITCKASQNIRTAVAWYQQKPGQSPKALIYLPSNRHTGVPDRFTGSGSGTDFTLTISNVQSEDLADYFCLQHWNYPLTFGAGTKLELKRADAAPTVSIFPPSSEQLTSGGASVVCFLNNFYPKDINVKWKIDGSERQNGVLNSWTDQDSKDSTYSMSSTLTLTKDEYERHNSYTCEATHKTSTSPIVKSFNRNEC

SEQ ID NO: 56 - protein, 450 aa, Mus musculus
  REGION 1..450: note = Description of sequence: I23RB31
  REGION 1..450: note = Description of type of peptide: Heavy Chain
EFQLQQSGAEMVRPGASVKLSCKASGYTFTGYWMNWVKQRPGQGLEWIGKIDPSDTETHYNQNFKDKATLTVDKSSSTAYMQLNSLTSEDSAVYYCARWGLGRNFAMDYWGQGTTLTVSSAKTTAPSVYPLAPVCGDTTGSSVTLGCLVKGYFPEPVTLTWNSGSLSSGVHTFPAVLQSDLYTLSSSVTVTSSTWPSQSITCNVAHPASSTKVDKKIEPRGPTIKPCPPCKCPAPNLLGGPSVFIFPPKIKDVLMISLSPIVTCVVVDVSEDDPDVQISWFVNNVEVHTAQTQTHREDYNSTLRVVSALPIQHQDWMSGKEFKCKVNNKDLPAPIERTISKPKGSVRAPQVYVLPPPEEEMTKKQVTLTCMVTDFMPEDIYVEWTNNGKTELNYKNTEPVLDSDGSYFMYSKLRVEKKNWVERNSYSCSVVHEGLHNHHTTKSFSRTPGK

SEQ ID NO: 57 - protein, 214 aa, Mus musculus
  REGION 1..214: note = Description of sequence: I23RB31
  REGION 1..214: note = Description of type of peptide: Light Chain
DIVLTQSPATLSVTPGDRVSLSCRASQSISDHLHWYQQKSHESPRLLIKFASQSISGIPSRFSGSGSGSDFTLSIDSVEPEDVGVYYCQNGHSFPLTFGSGTKLEIKRADAAPTVSIFPPSSEQLTSGGASVVCFLNNFYPKDINVKWKIDGSERQNGVLNSWTDQDSKDSTYSMSSTLTLTKDEYERHNSYTCEATHKTSTSPIVKSFNRNEC

SEQ ID NO: 58 - protein, 450 aa, Mus musculus
  REGION 1..450: note = Description of sequence: I23RB32
  REGION 1..450: note = Description of type of peptide: Heavy Chain
EFQLQQSGPELVKPGASVKLSCKASGYTFTDYALHWVKQSPGQGLEWIGWIYPGGGNTYYNDKFKGKATMTADKSSSTAYMQLSSLTSEDSAVYFCARGRLRRDYPMDYWGQGTSVTVSSAKTTAPSVYPLAPVCGDTTGSSVTLGCLVKGYFPEPVTLTWNSGSLSSGVHTFPAVLQSDLYTLSSSVTVTSSTWPSQSITCNVAHPASSTKVDKKIEPRGPTIKPCPPCKCPAPNLLGGPSVFIFPPKIKDVLMISLSPIVTCVVVDVSEDDPDVQISWFVNNVEVHTAQTQTHREDYNSTLRVVSALPIQHQDWMSGKEFKCKVNNKDLPAPIERTISKPKGSVRAPQVYVLPPPEEEMTKKQVTLTCMVTDFMPEDIYVEWTNNGKTELNYKNTEPVLDSDGSYFMYSKLRVEKKNWVERNSYSCSVVHEGLHNHHTTKSFSRTPGK

SEQ ID NO: 59 - protein, 220 aa, Mus musculus
  REGION 1..220: note = Description of sequence: I23RB32
  REGION 1..220: note = Description of type of peptide: Light Chain
DIVMTQSPSSLTVTAGEKVTMSCKSSQSLLNSGNQKNYLTWYQQKPGQPPKLLIYWASTRESGVPDRFTGSGSGTDFTLTISSVQAEDLAVYYCQNDYTYPLTFGSGTKLEIKRADAAPTVSIFPPSSEQLTSGGASVVCFLNNFYPKDINVKWKIDGSERQNGVLNSWTDQDSKDSTYSMSSTLTLTKDEYERHNSYTCEATHKTSTSPIVKSFNRNEC

SEQ ID NO: 60 - protein, 451 aa, Mus musculus
  REGION 1..451: note = Description of sequence: I23RB33
  REGION 1..451: note = Description of type of peptide: Heavy Chain
EVQLQQSGAELVKPGASVKLSCTASGFNIRDIYIHWVKQRPEQGLEWIGRIDPANGHSIYAAKFQGKATITADTSLNIAYMQLSSLTSGDTAVYYCARGSDNDYGRVLAYWGLGTSVTVSSAKTTAPSVYPLAPVCGDTTGSSVTLGCLVKGYFPEPVTLTWNSGSLSSGVHTFPAVLQSDLYTLSSSVTVTSSTWPSQSITCNVAHPASSTKVDKKIEPRGPTIKPCPPCKCPAPNLLGGPSVFIFPPKIKDVLMISLSPIVTCVVVDVSEDDPDVQISWFVNNVEVHTAQTQTHREDYNSTLRVVSALPIQHQDWMSGKEFKCKVNNKDLPAPIERTISKPKGSVRAPQVYVLPPPEEEMTKKQVTLTCMVTDFMPEDIYVEWTNNGKTELNYKNTEPVLDSDGSYFMYSKLRVEKKNWVERNSYSCSVVHEGLHNHHTTKSFSRTPGK

SEQ ID NO: 61 - protein, 216 aa, Mus musculus
  REGION 1..216: note = Description of sequence: I23RB33
  REGION 1..216: note = Description of type of peptide: Light Chain
DIVLTQSPAIMSASPGEKVTMTCRASSSVRSSYLHWYQQKSGASPKLWIYSTSNLASGVPARFSGSGSGTSYSLTITSVEAEDAATYYCQQYTGNPIFTFGSGTKLELKRADAAPTVSIFPPSSEQLTSGGASVVCFLNNFYPKDINVKWKIDGSERQNGVLNSWTDQDSKDSTYSMSSTLTLTKDEYERHNSYTCEATHKTSTSPIVKSFNRNEC

SEQ ID NO: 62 - protein, 453 aa, Mus musculus
  REGION 1..453: note = Description of sequence: I23RB35
  REGION 1..453: note = Description of type of peptide: Heavy Chain
DVQLQESGPGLVKPSQSLSLTCSVTGYSITSGHNWNWIRQFPGNKLEWLGYISYDGSNNYDPSLKNRISITRDTSKNQFFLKLNSVTTEDTATYYCARGGGYFGNSYRVFASWGQGTTVTVSSAKTTAPSVYPLAPVCGDTTGSSVTLGCLVKGYFPEPVTLTWNSGSLSSGVHTFPAVLQSDLYTLSSSVTVTSSTWPSQSITCNVAHPASSTKVDKKIEPRGPTIKPCPPCKCPAPNLLGGPSVFIFPPKIKDVLMISLSPIVTCVVVDVSEDDPDVQISWFVNNVEVHTAQTQTHREDYNSTLRVVSALPIQHQDWMSGKEFKCKVNNKDLPAPIERTISKPKGSVRAPQVYVLPPPEEEMTKKQVTLTCMVTDFMPEDIYVEWTNNGKTELNYKNTEPVLDSDGSYFMYSKLRVEKKNWVERNSYSCSVVHEGLHNHHTTKSFSRTPGK

SEQ ID NO: 63 - protein, 218 aa, Mus musculus
  REGION 1..218: note = Description of sequence: I23RB35
  REGION 1..218: note = Description of type of peptide: Light Chain
DIVLTQSPASLAVSLGQRATISCRASESVDSYGNSFMHWYQQKPGQPPKLLIYRASNLESEIPARFSGRGSGTDFTLTINPVEADDVATYYCQQSNADPYTFGGGTKLEIKRADAAPTVSIFPPSSEQLTSGGASVVCFLNNFYPKDINVKWKIDGSERQNGVLNSWTDQDSKDSTYSMSSTLTLTKDEYERHNSYTCEATHKTSTSPIVKSFNRNEC

SEQ ID NO: 64 - protein, 446 aa, Mus musculus
  REGION 1..446: note = Description of sequence: I23RB36
  REGION 1..446: note = Description of type of peptide: Heavy Chain
QIQLVQSGAELVKPGASVKLSCTTSGFNIKDTYIHWMKQRPEQGLEWIGRIDPANGNTIYASKFQGKATLTTDTSSNTAYMLLSSLTSGDTAVYYCTRGTSWFAYWGQGTTVTVSSAKTTAPSVYPLAPVCGDTTGSSVTLGCLVKGYFPEPVTLTWNSGSLSSGVHTFPAVLQSDLYTLSSSVTVTSSTWPSQSITCNVAHPASSTKVDKKIEPRGPTIKPCPPCKCPAPNLLGGPSVFIFPPKIKDVLMISLSPIVTCVVVDVSEDDPDVQISWFVNNVEVHTAQTQTHREDYNSTLRVVSALPIQHQDWMSGKEFKCKVNNKDLPAPIERTISKPKGSVRAPQVYVLPPPEEEMTKKQVTLTCMVTDFMPEDIYVEWTNNGKTELNYKNTEPVLDSDGSYFMYSKLRVEKKNWVERNSYSCSVVHEGLHNHHTTKSFSRTPGK

SEQ ID NO: 65 - protein, 214 aa, Mus musculus
  REGION 1..214: note = Description of sequence: I23RB36
  REGION 1..214: note = Description of type of peptide: Light Chain
DIVMTQSPKSMSMSVGERVTLSCKASENVGTSVSWFQQKPEQSPKLLIYGASNRYTGVPDRFTGSGSATDFTLTISSVQAEDLADYHCGQSYSYPRTFGGGTKLEIKRADAAPTVSIFPPSSEQLTSGGASVVCFLNNFYPKDINVKWKIDGSERQNGVLNSWTDQDSKDSTYSMSSTLTLTKDEYERHNSYTCEATHKTSTSPIVKSFNRNEC

SEQ ID NO: 66 - protein, 450 aa, Mus musculus
  REGION 1..450: note = Description of sequence: I23RB39
  REGION 1..450: note = Description of type of peptide: Heavy Chain
EVQLQQSGPELVKPGAPVKISCKASGYTFTNYYIHWVKQRPGQGLEWIGYIYPGNGGTAYNQKFKDKATLTADNPSSTAYMQLSSLTSEDSAVYFCARSRGGSRNYFDYWGQGTTLTVSSAKTTAPSVYPLAPVCGDTTGSSVTLGCLVKGYFPEPVTLTWNSGSLSSGVHTFPAVLQSDLYTLSSSVTVTSSTWPSQSITCNVAHPASSTKVDKKIEPRGPTIKPCPPCKCPAPNLLGGPSVFIFPPKIKDVLMISLSPIVTCVVVDVSEDDPDVQISWFVNNVEVHTAQTQTHREDYNSTLRVVSALPIQHQDWMSGKEFKCKVNNKDLPAPIERTISKPKGSVRAPQVYVLPPPEEEMTKKQVTLTCMVTDFMPEDIYVEWTNNGKTELNYKNTEPVLDSDGSYFMYSKLRVEKKNWVERNSYSCSVVHEGLHNHHTTKSFSRTPGK

SEQ ID NO: 67 - protein, 214 aa, Mus musculus
  REGION 1..214: note = Description of sequence: I23RB39
  REGION 1..214: note = Description of type of peptide: Light Chain
DIQMTQSHKFMSTSVGDRVSITCKASQDVSTAVAWYQQKPGQSPKLLIYSAFYRYTGVPDRFTGSGSGTDFTFTISSVQAEDLAVYYCQQHYSSPRTFGAGTKLELKRADAAPTVSIFPPSSEQLTSGGASVVCFLNNFYPKDINVKWKIDGSERQNGVLNSWTDQDSKDSTYSMSSTLTLTKDEYERHNSYTCEATHKTSTSPIVKSFNRNEC

SEQ ID NO: 68 - protein, 451 aa, Mus musculus
  REGION 1..451: note = Description of sequence: I23RB42
  REGION 1..451: note = Description of type of peptide: Heavy Chain
EVQLQQSGAELVKPGASVKISCKASGYSFTDYIMNWVKQSHGKSLEWIGNINPYFGFTSYNQEFKGKATLTVDKSSSTAYMLLNSLTSEDSAVYYCSRGSYYGYETFFDYWGQGTTLTVSSAKTTAPSVYPLAPVCGDTTGSSVTLGCLVKGYFPEPVTLTWNSGSLSSGVHTFPAVLQSDLYTLSSSVTVTSSTWPSQSITCNVAHPASSTKVDKKIEPRGPTIKPCPPCKCPAPNLLGGPSVFIFPPKIKDVLMISLSPIVTCVVVDVSEDDPDVQISWFVNNVEVHTAQTQTHREDYNSTLRVVSALPIQHQDWMSGKEFKCKVNNKDLPAPIERTISKPKGSVRAPQVYVLPPPEEEMTKKQVTLTCMVTDFMPEDIYVEWTNNGKTELNYKNTEPVLDSDGSYFMYSKLRVEKKNWVERNSYSCSVVHEGLHNHHTTKSFSRTPGK

SEQ ID NO: 69 - protein, 219 aa, Mus musculus
  REGION 1..219: note = Description of sequence: I23RB42
  REGION 1..219: note = Description of type of peptide: Light Chain
DIVLTQTAPSVPVTPGESVSISCRSSKSLLHSNGNTYLYWFLQRPGQSPQLLIYRMSNLASGVPDRFSGSGSGTAFTLRISRVEAEDVGVYYCMQHLEYPYTFGSGTRLEIKRADAAPTVSIFPPSSEQLTSGGASVVCFLNNFYPKDINVKWKIDGSERQNGVLNSWTDQDSKDSTYSMSSTLTLTKDEYERHNSYTCEATHKTSTSPIVKSFNRNEC

SEQ ID NO: 70 - protein, 454 aa, Mus musculus
  REGION 1..454: note = Description of sequence: I23RB45
  REGION 1..454: note = Description of type of peptide: Heavy Chain
QVTLKESGPGILQPSQTLSLTCSFSGFSLSTYGMGVSWIRQPSGKGLEWLAHIYWDDDKRYNPSLKSRLTISKDTSNNQVFLKITSVDTADTATYYCAQRALPLLGQKAPFDYWGQGTTLTVSSAKTTAPSVYPLAPVCGDTTGSSVTLGCLVKGYFPEPVTLTWNSGSLSSGVHTFPAVLQSDLYTLSSSVTVTSSTWPSQSITCNVAHPASSTKVDKKIEPRGPTIKPCPPCKCPAPNLLGGPSVFIFPPKIKDVLMISLSPIVTCVVVDVSEDDPDVQISWFVNNVEVHTAQTQTHREDYNSTLRVVSALPIQHQDWMSGKEFKCKVNNKDLPAPIERTISKPKGSVRAPQVYVLPPPEEEMTKKQVTLTCMVTDFMPEDIYVEWTNNGKTELNYKNTEPVLDSDGSYFMYSKLRVEKKNWVERNSYSCSVVHEGLHNHHTTKSFSRTPGK

SEQ ID NO: 71 - protein, 214 aa, Mus musculus
  REGION 1..214: note = Description of sequence: I23RB45
  REGION 1..214: note = Description of type of peptide: Light Chain
DIVLTQSQKFISTSVGDRVSITCKASQNVRTAVAWYQQKPGQSPKLLIYLPSNRHTGVPDRFTGSGSGTVFTLTISNVQSEDQADYFCLQHWNYPLTFGAGTKLELKRADAAPTVSIFPPSSEQLTSGGASVVCFLNNFYPKDINVKWKIDGSERQNGVLNSWTDQDSKDSTYSMSSTLTLTKDEYERHNSYTCEATHKTSTSPIVKSFNRNEC

SEQ ID NO: 72 - protein, 451 aa, Mus musculus
  REGION 1..451: note = Description of sequence: I23RB47
  REGION 1..451: note = Description of type of peptide: Heavy Chain
QVQLKESGPGLVAPSQSLSITCTVSGFSLTNYDIHWVRQSPGKGLEWLGVIWSDGRTDYKGAFISRLSISKDNSKSQVFFKMNSLQADDTAIYYCARNNYYRYGRNTMDYWGQGTSVTVSSAKTTAPSVYPLAPVCGDTTGSSVTLGCLVKGYFPEPVTLTWNSGSLSSGVHTFPAVLQSDLYTLSSSVTVTSSTWPSQSITCNVAHPASSTKVDKKIEPRGPTIKPCPPCKCPAPNLLGGPSVFIFPPKIKDVLMISLSPIVTCVVVDVSEDDPDVQISWFVNNVEVHTAQTQTHREDYNSTLRVVSALPIQHQDWMSGKEFKCKVNNKDLPAPIERTISKPKGSVRAPQVYVLPPPEEEMTKKQVTLTCMVTDFMPEDIYVEWTNNGKTELNYKNTEPVLDSDGSYFMYSKLRVEKKNWVERNSYSCSVVHEGLHNHHTTKSFSRTPGK

SEQ ID NO: 73 - protein, 214 aa, Mus musculus
  REGION 1..214: note = Description of sequence: I23RB47
  REGION 1..214: note = Description of type of peptide: Light Chain
DIVLTQSPASQSASLGESVTITCLASQTIGSWLAWYQQKPGKSPQLLIYAATRLADGVPSRFSGSGSGTKFSFKISSLQAEDFVFYYCHQLYSIPLTFGGGTKLEMKRADAAPTVSIFPPSSEQLTSGGASVVCFLNNFYPKDINVKWKIDGSERQNGVLNSWTDQDSKDSTYSMSSTLTLTKDEYERHNSYTCEATHKTSTSPIVKSFNRNEC

SEQ ID NO: 74 - protein, 448 aa, Mus musculus
  REGION 1..448: note = Description of sequence: I23RB51
  REGION 1..448: note = Description of type of peptide: Heavy Chain
QVQLQQSGPDLVKPSQSLSLTCTVTGYSITSGYNWHWIRQFPGNKLEWMGYVHYRDSTHYNPSLKSRISITRDTSKNQFFLQLNSVTTEDTATYYCARQLGLKAMDYWGQGTSVTVSSAKTTAPSVYPLAPVCGDTTGSSVTLGCLVKGYFPEPVTLTWNSGSLSSGVHTFPAVLQSDLYTLSSSVTVTSSTWPSQSITCNVAHPASSTKVDKKIEPRGPTIKPCPPCKCPAPNLLGGPSVFIFPPKIKDVLMISLSPIVTCVVVDVSEDDPDVQISWFVNNVEVHTAQTQTHREDYNSTLRVVSALPIQHQDWMSGKEFKCKVNNKDLPAPIERTISKPKGSVRAPQVYVLPPPEEEMTKKQVTLTCMVTDFMPEDIYVEWTNNGKTELNYKNTEPVLDSDGSYFMYSKLRVEKKNWVERNSYSCSVVHEGLHNHHTTKSFSRTPGK

SEQ ID NO: 75 - protein, 213 aa, Mus musculus
  REGION 1..213: note = Description of sequence: I23RB51
  REGION 1..213: note = Description of type of peptide: Light Chain
DIVLTQSPASLSASVGETVTITCRASGNIHNYLAWYQHKQGKSPQLLVYNAKTLADGVPSRFSGSGSGTQYSLKINSLQPEDFGSYYCQYFWTTRTFGAGTKLELKRADAAPTVSIFPPSSEQLTSGGASVVCFLNNFYPKDINVKWKIDGSERQNGVLNSWTDQDSKDSTYSMSSTLTLTKDEYERHNSYTCEATHKTSTSPIVKSFNRNEC

SEQ ID NO: 76 - protein, 449 aa, Mus musculus
  REGION 1..449: note = Description of sequence: I23RB54
  REGION 1..449: note = Description of type of peptide: Heavy Chain
EVQLQQSGGGLVKPGGSLKLSCAASGFTFSSYAMSWVRQTPEKRLEWVAGISSGGSYIYYPDNVKGRFTISRDNARNTLYLQMSSLRSEDTAMYYCARKKSDYGAMDYWGQGTTLTVSSAKTTAPSVYPLAPVCGDTTGSSVTLGCLVKGYFPEPVTLTWNSGSLSSGVHTFPAVLQSDLYTLSSSVTVTSSTWPSQSITCNVAHPASSTKVDKKIEPRGPTIKPCPPCKCPAPNLLGGPSVFIFPPKIKDVLMISLSPIVTCVVVDVSEDDPDVQISWFVNNVEVHTAQTQTHREDYNSTLRVVSALPIQHQDWMSGKEFKCKVNNKDLPAPIERTISKPKGSVRAPQVYVLPPPEEEMTKKQVTLTCMVTDFMPEDIYVEWTNNGKTELNYKNTEPVLDSDGSYFMYSKLRVEKKNWVERNSYSCSVVHEGLHNHHTTKSFSRTPGK

SEQ ID NO: 77 - protein, 214 aa, Mus musculus
  REGION 1..214: note = Description of sequence: I23RB54
  REGION 1..214: note = Description of type of peptide: Light Chain
DIQMTQSPKFLLVSAGDRVTITCKASQSVSNDVAWYQQKPGQSPRLLIYYASNRYTGVPDRFTGSGYGTDFTFTISTVQAEDLAVYFCQQDYSSLPTFGAGTKLEMKRADAAPTVSIFPPSSEQLTSGGASVVCFLNNFYPKDINVKWKIDGSERQNGVLNSWTDQDSKDSTYSMSSTLTLTKDEYERHNSYTCEATHKTSTSPIVKSFNRNEC

SEQ ID NO: 78 - protein, 452 aa, Mus musculus
  REGION 1..452: note = Description of sequence: I23RB56
  REGION 1..452: note = Description of type of peptide: Heavy Chain
EVKLVESGGGLVKPGGSLKLSCAASGFTFSSYAMSWVRQTPEKRLEWVAAINSNDGSTYYPDTVKDRFTISRDNAKNTLYLQMSSLRSEDTALYYCARHFLYFSNFYYFDYWGQGTTLTVSSAKTTAPSVYPLAPVCGDTTGSSVTLGCLVKGYFPEPVTLTWNSGSLSSGVHTFPAVLQSDLYTLSSSVTVTSSTWPSQSITCNVAHPASSTKVDKKIEPRGPTIKPCPPCKCPAPNLLGGPSVFIFPPKIKDVLMISLSPIVTCVVVDVSEDDPDVQISWFVNNVEVHTAQTQTHREDYNSTLRVVSALPIQHQDWMSGKEFKCKVNNKDLPAPIERTISKPKGSVRAPQVYVLPPPEEEMTKKQVTLTCMVTDFMPEDIYVEWTNNGKTELNYKNTEPVLDSDGSYFMYSKLRVEKKNWVERNSYSCSVVHEGLHNHHTTKSFSRTPGK

SEQ ID NO: 79 - protein, 214 aa, Mus musculus
  REGION 1..214: note = Description of sequence: I23RB56
  REGION 1..214: note = Description of type of peptide: Light Chain
DIVMTQSPKFLLVSAGDRVTITCKASQSVSNDVAWYQQKPGQSPKLLIYYASNRYTGVPDRFTGSGYGTVFTFTISTVQAEDLAVYFCQQDYSSPFTFGSGTKLEIKRADAAPTVSIFPPSSEQLTSGGASVVCFLNNFYPKDINVKWKIDGSERQNGVLNSWTDQDSKDSTYSMSSTLTLTKDEYERHNSYTCEATHKTSTSPIVKSFNRNEC

SEQ ID NO: 80 - protein, 449 aa, Mus musculus
  REGION 1..449: note = Description of sequence: I23RB57
  REGION 1..449: note = Description of type of peptide: Heavy Chain
EFQLQQSGPELVKPGASVKMSCKASGYTFTNYYMHWVKQSHGKTIEWIGYIYPNSGDTSYNQKFKGKATLTVDKSSSTAYMELRSLTSEDSAVYNCARFGGFYDAMDYWGQGTSVTVSSAKTTAPSVYPLAPVCGDTTGSSVTLGCLVKGYFPEPVTLTWNSGSLSSGVHTFPAVLQSDLYTLSSSVTVTSSTWPSQSITCNVAHPASSTKVDKKIEPRGPTIKPCPPCKCPAPNLLGGPSVFIFPPKIKDVLMISLSPIVTCVVVDVSEDDPDVQISWFVNNVEVHTAQTQTHREDYNSTLRVVSALPIQHQDWMSGKEFKCKVNNKDLPAPIERTISKPKGSVRAPQVYVLPPPEEEMTKKQVTLTCMVTDFMPEDIYVEWTNNGKTELNYKNTEPVLDSDGSYFMYSKLRVEKKNWVERNSYSCSVVHEGLHNHHTTKSFSRTPGK

SEQ ID NO: 81 - protein, 215 aa, Mus musculus
  REGION 1..215: note = Description of sequence: I23RB57
  REGION 1..215: note = Description of type of peptide: Light Chain
DIVMTQSPAIMSASLGERVTMTCTASSSVSSSYLHWYQQKPGSSPKLWIYSTSNLASGVPARFSGSGSGTSYSLTISSMEAEDAATYYCHQYHRSPFTFGSGTKLEIKRADAAPTVSIFPPSSEQLTSGGASVVCFLNNFYPKDINVKWKIDGSERQNGVLNSWTDQDSKDSTYSMSSTLTLTKDEYERHNSYTCEATHKTSTSPIVKSFNRNEC

SEQ ID NO: 82 - protein, 457 aa, Mus musculus
  REGION 1..457: note = Description of sequence: I23RB58
  REGION 1..457: note = Description of type of peptide: Heavy Chain
EVKLVESGGGLVKPGGSLKLSCAASGFSFIIYTMSWVRQTPEKRLEWVAYITSGGGITYYPDSVKGRFTISRDNARNTLYLQMSSLRSEDTAMYYCARHEGDYYDDYYRIGYAMDYWGQGTSVTVSSAKTTAPSVYPLAPVCGDTTGSSVTLGCLVKGYFPEPVTLTWNSGSLSSGVHTFPAVLQSDLYTLSSSVTVTSSTWPSQSITCNVAHPASSTKVDKKIEPRGPTIKPCPPCKCPAPNLLGGPSVFIFPPKIKDVLMISLSPIVTCVVVDVSEDDPDVQISWFVNNVEVHTAQTQTHREDYNSTLRVVSALPIQHQDWMSGKEFKCKVNNKDLPAPIERTISKPKGSVRAPQVYVLPPPEEEMTKKQVTLTCMVTDFMPEDIYVEWTNNGKTELNYKNTEPVLDSDGSYFMYSKLRVEKKNWVERNSYSCSVVHEGLHNHHTTKSFSRTPGK

SEQ ID NO: 83 - protein, 218 aa, Mus musculus
  REGION 1..218: note = Description of sequence: I23RB58
  REGION 1..218: note = Description of type of peptide: Light Chain
DIVMTQTPASLAVSLGQRATISCRASESVDSYGNSFMHWYQQKPGQPPKLLIYRASNLESGIPARFSGSGSRTDFTLTINPVEADDVATYYCQQSNEDPLTFGAGTKLEMKRADAAPTVSIFPPSSEQLTSGGASVVCFLNNFYPKDINVKWKIDGSERQNGVLNSWTDQDSKDSTYSMSSTLTLTKDEYERHNSYTCEATHKTSTSPIVKSFNRNEC

SEQ ID NO: 84 - protein, 447 aa, Mus musculus
  REGION 1..447: note = Description of sequence: I23RB60
  REGION 1..447: note = Description of type of peptide: Heavy Chain
DVQLQESGPELVKPGDSVKMSCEASGYTFTDYYIDWVKQSHGKSLEWIGYIYPNNGGISFNQKFEGKATLTVDKSSSTAYMELHSLTSEDSAVYYCAREKLRGRDYWGQGTTLTVSSAKTTAPSVYPLAPVCGDTTGSSVTLGCLVKGYFPEPVTLTWNSGSLSSGVHTFPAVLQSDLYTLSSSVTVTSSTWPSQSITCNVAHPASSTKVDKKIEPRGPTIKPCPPCKCPAPNLLGGPSVFIFPPKIKDVLMISLSPIVTCVVVDVSEDDPDVQISWFVNNVEVHTAQTQTHREDYNSTLRVVSALPIQHQDWMSGKEFKCKVNNKDLPAPIERTISKPKGSVRAPQVYVLPPPEEEMTKKQVTLTCMVTDFMPEDIYVEWTNNGKTELNYKNTEPVLDSDGSYFMYSKLRVEKKNWVERNSYSCSVVHEGLHNHHTTKSFSRTPGK

SEQ ID NO: 85 - protein, 214 aa, Mus musculus
  REGION 1..214: note = Description of sequence: I23RB60
  REGION 1..214: note = Description of type of peptide: Light Chain
DIVMTQSTSSLSASLGDRVTISCRASQDIRNNLNWYQQKPDGTVKLLIFYSSRLHSGVPSRFSGSGSGTDYSLTISNLEQEDIATYFCQQGHTLPWTFGAGTKLELKRADAAPTVSIFPPSSEQLTSGGASVVCFLNNFYPKDINVKWKIDGSERQNGVLNSWTDQDSKDSTYSMSSTLTLTKDEYERHNSYTCEATHKTSTSPIVKSFNRNEC

SEQ ID NO: 86 - protein, 449 aa, Mus musculus
  REGION 1..449: note = Description of sequence: I23RB61
  REGION 1..449: note = Description of type of peptide: Heavy Chain
DVQLQESGAELVKPGASVKLSCKSFDYTFTSFDINWMKQRPGQGLEWIGWIFPGSGTTNYNEKFKGKATLTADKSSSTAYMHLTSLTSEDSAVYFCARRLTGTRYFDVWGTGTTLTVSSAKTTAPSVYPLAPVCGDTTGSSVTLGCLVKGYFPEPVTLTWNSGSLSSGVHTFPAVLQSDLYTLSSSVTVTSSTWPSQSITCNVAHPASSTKVDKKIEPRGPTIKPCPPCKCPAPNLLGGPSVFIFPPKIKDVLMISLSPIVTCVVVDVSEDDPDVQISWFVNNVEVHTAQTQTHREDYNSTLRVVSALPIQHQDWMSGKEFKCKVNNKDLPAPIERTISKPKGSVRAPQVYVLPPPEEEMTKKQVTLTCMVTDFMPEDIYVEWTNNGKTELNYKNTEPVLDSDGSYFMYSKLRVEKKNWVERNSYSCSVVHEGLHNHHTTKSFSRTPGK

SEQ ID NO: 87 - protein, 214 aa, Mus musculus
  REGION 1..214: note = Description of sequence: I23RB61
  REGION 1..214: note = Description of type of peptide: Light Chain
DIQMTQSHKFLSTSVGDRITITCKASQDVITAVAWYQQKSGQSPKLLIYWASTRHTGVPDRFTGSGSGTDYTLTISNVQAEDLALYYCQQHYTTPPTFGAGTKLELKRADAAPTVSIFPPSSEQLTSGGASVVCFLNNFYPKDINVKWKIDGSERQNGVLNSWTDQDSKDSTYSMSSTLTLTKDEYERHNSYTCEATHKTSTSPIVKSFNRNEC

SEQ ID NO: 88 - protein, 449 aa, Mus musculus
  REGION 1..449: note = Description of sequence: I23RB65
  REGION 1..449: note = Description of type of peptide: Heavy Chain
EVQLQQSGPELVKPGASVKISCKASGYTFTDHTMDWVKQSHGKSLEWIGYIYPKSGNAAYSQKFKSEATLTVDKSSSTAYMEFHSLTSEDSAVYYCARWGLRRDGFTYWGQGTSVTVSSAKTTAPSVYPLAPVCGDTTGSSVTLGCLVKGYFPEPVTLTWNSGSLSSGVHTFPAVLQSDLYTLSSSVTVTSSTWPSQSITCNVAHPASSTKVDKKIEPRGPTIKPCPPCKCPAPNLLGGPSVFIFPPKIKDVLMISLSPIVTCVVVDVSEDDPDVQISWFVNNVEVHTAQTQTHREDYNSTLRVVSALPIQHQDWMSGKEFKCKVNNKDLPAPIERTISKPKGSVRAPQVYVLPPPEEEMTKKQVTLTCMVTDFMPEDIYVEWTNNGKTELNYKNTEPVLDSDGSYFMYSKLRVEKKNWVERNSYSCSVVHEGLHNHHTTKSFSRTPGK

SEQ ID NO: 89 - protein, 218 aa, Mus musculus
  REGION 1..218: note = Description of sequence: I23RB65
  REGION 1..218: note = Description of type of peptide: Light Chain
QIVLTQSPASLAVSLGQRATISCRASQSVSTSSYNYIHWYQQKPGQPPKLLIKYASNLESGVPARFSGSGSGTDFTLNIHPVEEDDTATYYCQHTWEIPYTFGSGTKLEIKRADAAPTVSIFPPSSEQLTSGGASVVCFLNNFYPKDINVKWKIDGSERQNGVLNSWTDQDSKDSTYSMSSTLTLTKDEYERHNSYTCEATHKTSTSPIVKSFNRNEC

SEQ ID NO: 90 - protein, 450 aa, Mus musculus
  REGION 1..450: note = Description of sequence: I23RB66
  REGION 1..450: note = Description of type of peptide: Heavy Chain
QVTLKESGPGILQPSQTLSLTCSFSGFSLSTSNMGIGWIRQPSGKGLEWLAHIWWNSDKYYNPSLKSRLTISKDTSNNQVFLTITSVDTADTATYYCAQIRWLRFYFDYWGQGTTVTVSSAKTTAPSVYPLAPVCGDTTGSSVTLGCLVKGYFPEPVTLTWNSGSLSSGVHTFPAVLQSDLYTLSSSVTVTSSTWPSQSITCNVAHPASSTKVDKKIEPRGPTIKPCPPCKCPAPNLLGGPSVFIFPPKIKDVLMISLSPIVTCVVVDVSEDDPDVQISWFVNNVEVHTAQTQTHREDYNSTLRVVSALPIQHQDWMSGKEFKCKVNNKDLPAPIERTISKPKGSVRAPQVYVLPPPEEEMTKKQVTLTCMVTDFMPEDIYVEWTNNGKTELNYKNTEPVLDSDGSYFMYSKLRVEKKNWVERNSYSCSVVHEGLHNHHTTKSFSRTPGK

SEQ ID NO: 91 - protein, 214 aa, Mus musculus
  REGION 1..214: note = Description of sequence: I23RB66
  REGION 1..214: note = Description of type of peptide: Light Chain
DIVMTQSHKFMSTSVGDRVSITCKASQDVSTAVAWYQQKPGQSPKLLIYSASYRYTGVPDRFTGSGSGTDFTFTFSSVQAEDLAVYYCQQHYSTPYTFGGGTKLEIKRADAAPTVSIFPPSSEQLTSGGASVVCFLNNFYPKDINVKWKIDGSERQNGVLNSWTDQDSKDSTYSMSSTLTLTKDEYERHNSYTCEATHKTSTSPIVKSFNRNEC

SEQ ID NO: 92 - protein, 450 aa, Mus musculus
  REGION 1..450: note = Description of sequence: I23RB67
  REGION 1..450: note = Description of type of peptide: Heavy Chain
EVQLQQSGAELVKPGASVKLSCKASGYTFTSYWINWVKQRPGQGLEWIGNIYPGSSSTNYNEKFKSKATLTVDTSSSTAYMQLSSLTSDDSAVYYCARSAYGNRLAMDYWGQGTTLTVSSAKTTAPSVYPLAPVCGDTTGSSVTLGCLVKGYFPEPVTLTWNSGSLSSGVHTFPAVLQSDLYTLSSSVTVTSSTWPSQSITCNVAHPASSTKVDKKIEPRGPTIKPCPPCKCPAPNLLGGPSVFIFPPKIKDVLMISLSPIVTCVVVDVSEDDPDVQISWFVNNVEVHTAQTQTHREDYNSTLRVVSALPIQHQDWMSGKEFKCKVNNKDLPAPIERTISKPKGSVRAPQVYVLPPPEEEMTKKQVTLTCMVTDFMPEDIYVEWTNNGKTELNYKNTEPVLDSDGSYFMYSKLRVEKKNWVERNSYSCSVVHEGLHNHHTTKSFSRTPGK

SEQ ID NO: 93 - protein, 214 aa, Mus musculus
  REGION 1..214: note = Description of sequence: I23RB67
  REGION 1..214: note = Description of type of peptide: Light Chain
DVVMTQSHKFMSTSVGDRVSITCKASQDVSTAVAWYQQKPGQSPKLLIYSAFYRYTGVPDRFTGSGSGTDFTFTISSVQAEDLAVYYCQQHYSTPYTFGGGTKLELKRADAAPTVSIFPPSSEQLTSGGASVVCFLNNFYPKDINVKWKIDGSERQNGVLNSWTDQDSKDSTYSMSSTLTLTKDEYERHNSYTCEATHKTSTSPIVKSFNRNEC

SEQ ID NO: 94 - protein, 448 aa, Mus musculus
  REGION 1..448: note = Description of sequence: I23RB69
  REGION 1..448: note = Description of type of peptide: Heavy Chain
EVQLQQSGAELVKPGASVKISCKASGYSFTGYNMNWVKQSHGKSLEWIGNINPFYDKTSYNQKFKGKATLTVDKASSTAYMQLNSLTSEDSAVYYCARQLGLKGFAYWGQGTLVTVSAAKTTAPSVYPLAPVCGDTTGSSVTLGCLVKGYFPEPVTLTWNSGSLSSGVHTFPAVLQSDLYTLSSSVTVTSSTWPSQSITCNVAHPASSTKVDKKIEPRGPTIKPCPPCKCPAPNLLGGPSVFIFPPKIKDVLMISLSPIVTCVVVDVSEDDPDVQISWFVNNVEVHTAQTQTHREDYNSTLRVVSALPIQHQDWMSGKEFKCKVNNKDLPAPIERTISKPKGSVRAPQVYVLPPPEEEMTKKQVTLTCMVTDFMPEDIYVEWTNNGKTELNYKNTEPVLDSDGSYFMYSKLRVEKKNWVERNSYSCSVVHEGLHNHHTTKSFSRTPGK

SEQ ID NO: 95 - protein, 214 aa, Mus musculus
  REGION 1..214: note = Description of sequence: I23RB69
  REGION 1..214: note = Description of type of peptide: Light Chain
DIVMTQSHKFMSTSVGDRVSITCKASQDVSTAVAWYQQKPGQSPKLLIYSASYRYTGVPDRFTGSGSGTDFTFTISSVQAEDLAVYYCQQHYSTPWTFGGGTKLEMKRADAAPTVSIFPPSSEQLTSGGASVVCFLNNFYPKDINVKWKIDGSERQNGVLNSWTDQDSKDSTYSMSSTLTLTKDEYERHNSYTCEATHKTSTSPIVKSFNRNEC

SEQ ID NO: 96 - protein, 448 aa, Mus musculus
  REGION 1..448: note = Description of sequence: I23RB71
  REGION 1..448: note = Description of type of peptide: Heavy Chain
DVQLQESGPDLVKPSQSLSLTCTVTDYSITRGYNWHWIRQFPGNKLEWMGYIHYSGSTNYNPSLKSRISITRDTSKNQFFLQLNSVTTEDTATYYCARQYGLKAMDYWGQGTSVTVSSAKTTAPSVYPLAPVCGDTTGSSVTLGCLVKGYFPEPVTLTWNSGSLSSGVHTFPAVLQSDLYTLSSSVTVTSSTWPSQSITCNVAHPASSTKVDKKIEPRGPTIKPCPPCKCPAPNLLGGPSVFIFPPKIKDVLMISLSPIVTCVVVDVSEDDPDVQISWFVNNVEVHTAQTQTHREDYNSTLRVVSALPIQHQDWMSGKEFKCKVNNKDLPAPIERTISKPKGSVRAPQVYVLPPPEEEMTKKQVTLTCMVTDFMPEDIYVEWTNNGKTELNYKNTEPVLDSDGSYFMYSKLRVEKKNWVERNSYSCSVVHEGLHNHHTTKSFSRTPGK

SEQ ID NO: 97 - protein, 214 aa, Mus musculus
  REGION 1..214: note = Description of sequence: I23RB71
  REGION 1..214: note = Description of type of peptide: Light Chain
DIVMTQSHKFMSTSVGDRVSITCKASQDVITAVAWYQQKPGQSPKLLIYSASYRYTGVPDRFTGSGSGTDFTFTISSVQAEDLAVYFCQQHFGTPYTFGSGTKLEMKRADAAPTVSIFPPSSEQLTSGGASVVCFLNNFYPKDINVKWKIDGSERQNGVLNSWTDQDSKDSTYSMSSTLTLTKDEYERHNSYTCEATHKTSTSPIVKSFNRNEC

SEQ ID NO: 98 - protein, 453 aa, Mus musculus
  REGION 1..453: note = Description of sequence: I23RB73
  REGION 1..453: note = Description of type of peptide: Heavy Chain
EVQLQQSGAELVKPGASVKISCKASGYTFTDHAIHWVKQRPEQGLEWIGYISLGNGDIKYSEKFRGKATLTADKTSNTAYMQLNSLTSEDSAVYFCKRSRVLRWTTYWYFDVWGAGTSVTVSSAKTTAPSVYPLAPVCGDTTGSSVTLGCLVKGYFPEPVTLTWNSGSLSSGVHTFPAVLQSDLYTLSSSVTVTSSTWPSQSITCNVAHPASSTKVDKKIEPRGPTIKPCPPCKCPAPNLLGGPSVFIFPPKIKDVLMISLSPIVTCVVVDVSEDDPDVQISWFVNNVEVHTAQTQTHREDYNSTLRVVSALPIQHQDWMSGKEFKCKVNNKDLPAPIERTISKPKGSVRAPQVYVLPPPEEEMTKKQVTLTCMVTDFMPEDIYVEWTNNGKTELNYKNTEPVLDSDGSYFMYSKLRVEKKNWVERNSYSCSVVHEGLHNHHTTKSFSRTPGK

SEQ ID NO: 99 - protein, 214 aa, Mus musculus
  REGION 1..214: note = Description of sequence: I23RB73
  REGION 1..214: note = Description of type of peptide: Light Chain
DIVMTQSHKFMSTSVGDRVSITCKASQDVSTAVAWYQQKPGQSPKLLIYWASTRLTGVPDRFTGSGSGTDYTLTISSVQAEDLALYYCQQYYNTPLTFGAGTKLELKRADAAPTVSIFPPSSEQLTSGGASVVCFLNNFYPKDINVKWKIDGSERQNGVLNSWTDQDSKDSTYSMSSTLTLTKDEYERHNSYTCEATHKTSTSPIVKSFNRNEC

SEQ ID NO: 100 - protein, 452 aa, Mus musculus
  REGION 1..452: note = Description of sequence: I23RB74
  REGION 1..452: note = Description of type of peptide: Heavy Chain
DVQLQESGPGLVKPSQSLSLTCSVTGYSITSGYYWNWIRQFPGNKLEWMGYISYDGSFNYNPSLKNRLSITRDTSMNQFFLKLNSVTSEDTATYYCARAEIYYDYDGDFDYWGQGTTLTVSSAKTTAPSVYPLAPVCGDTTGSSVTLGCLVKGYFPEPVTLTWNSGSLSSGVHTFPAVLQSDLYTLSSSVTVTSSTWPSQSITCNVAHPASSTKVDKKIEPRGPTIKPCPPCKCPAPNLLGGPSVFIFPPKIKDVLMISLSPIVTCVVVDVSEDDPDVQISWFVNNVEVHTAQTQTHREDYNSTLRVVSALPIQHQDWMSGKEFKCKVNNKDLPAPIERTISKPKGSVRAPQVYVLPPPEEEMTKKQVTLTCMVTDFMPEDIYVEWTNNGKTELNYKNTEPVLDSDGSYFMYSKLRVEKKNWVERNSYSCSVVHEGLHNHHTTKSFSRTPGK

SEQ ID NO: 101 - protein, 218 aa, Mus musculus
  REGION 1..218: note = Description of sequence: I23RB74
  REGION 1..218: note = Description of type of peptide: Light Chain
DIVLTQSPASLAVSLGQRATISCRASKSVSTSGSNFLHWYQQKPGQPPKLLIYFASNLESGVPARFSGSGSGTDFTLNIHPVEEEDAATYYCQHSRELPHTFGAGTKLELKRADAAPTVSIFPPSSEQLTSGGASVVCFLNNFYPKDINVKWKIDGSERQNGVLNSWTDQDSKDSTYSMSSTLTLTKDEYERHNSYTCEATHKTSTSPIVKSFNRNEC

SEQ ID NO: 102 - protein, 448 aa, Mus musculus
  REGION 1..448: note = Description of sequence: I23RB76
  REGION 1..448: note = Description of type of peptide: Heavy Chain
EVQLQQSGPELVKPGASVKMSCKASGYTFTDYYMNWMKQSHGKSLEWIGYISPKNGRTGYNQKFKGKATLTVDKSSTTAYMELRSLTSEDSAVYYCAKSNGYYALDYWGQGTTVTVSSAKTTAPSVYPLAPVCGDTTGSSVTLGCLVKGYFPEPVTLTWNSGSLSSGVHTFPAVLQSDLYTLSSSVTVTSSTWPSQSITCNVAHPASSTKVDKKIEPRGPTIKPCPPCKCPAPNLLGGPSVFIFPPKIKDVLMISLSPIVTCVVVDVSEDDPDVQISWFVNNVEVHTAQTQTHREDYNSTLRVVSALPIQHQDWMSGKEFKCKVNNKDLPAPIERTISKPKGSVRAPQVYVLPPPEEEMTKKQVTLTCMVTDFMPEDIYVEWTNNGKTELNYKNTEPVLDSDGSYFMYSKLRVEKKNWVERNSYSCSVVHEGLHNHHTTKSFSRTPGK

SEQ ID NO: 103 - protein, 214 aa, Mus musculus
  REGION 1..214: note = Description of sequence: I23RB76
  REGION 1..214: note = Description of type of peptide: Light Chain
DIVLTQSPATLCVTPGETVSLSCRASQNIYKNLHWFQQKSHRSPRLLIKYASDSISGIPSRFTGSGSGTDYTLSINSVKPEDEGIYYCLQGYSTPWTFGGGTKLEIKRADAAPTVSIFPPSSEQLTSGGASVVCFLNNFYPKDINVKWKIDGSERQNGVLNSWTDQDSKDSTYSMSSTLTLTKDEYERHNSYTCEATHKTSTSPIVKSFNRNEC

SEQ ID NO: 104 - protein, 450 aa, Mus musculus
  REGION 1..450: note = Description of sequence: I23RB77
  REGION 1..450: note = Description of type of peptide: Heavy Chain
DVQLQESGPGLVAPSQSLSITCTVSGFSLSRYSVHWVRQPPGKGLEWLGMIWGSGSTDYNSALKSRLSINKDNSKSQVFLKMNSLQTDDTAMYYCARVYYGGSPYAMDYWGQGTTVTVSSAKTTAPSVYPLAPVCGDTTGSSVTLGCLVKGYFPEPVTLTWNSGSLSSGVHTFPAVLQSDLYTLSSSVTVTSSTWPSQSITCNVAHPASSTKVDKKIEPRGPTIKPCPPCKCPAPNLLGGPSVFIFPPKIKDVLMISLSPIVTCVVVDVSEDDPDVQISWFVNNVEVHTAQTQTHREDYNSTLRVVSALPIQHQDWMSGKEFKCKVNNKDLPAPIERTISKPKGSVRAPQVYVLPPPEEEMTKKQVTLTCMVTDFMPEDIYVEWTNNGKTELNYKNTEPVLDSDGSYFMYSKLRVEKKNWVERNSYSCSVVHEGLHNHHTTKSFSRTPGK

SEQ ID NO: 105 - protein, 218 aa, Mus musculus
  REGION 1..218: note = Description of sequence: I23RB77
  REGION 1..218: note = Description of type of peptide: Light Chain
DIVMTQSPASLALSLGQRATISCRASESVDSYGNSFMHWYQQKPGQPPKLLIYLASNLESGVPARFSGSGSRTDFTLTIDPVEADDAAIYYCQQNNEEPNTFGAGTKLEMKRADAAPTVSIFPPSSEQLTSGGASVVCFLNNFYPKDINVKWKIDGSERQNGVLNSWTDQDSKDSTYSMSSTLTLTKDEYERHNSYTCEATHKTSTSPIVKSFNRNEC

SEQ ID NO: 106 - protein, 448 aa, Mus musculus
  REGION 1..448: note = Description of sequence: I23RB78
  REGION 1..448: note = Description of type of peptide: Heavy Chain
EFQLQQSGGGLVKPGGSLKLSCAASGFTFSNYTMSWVRQTPEKRLKWVACISSGGGNTYYPDSVKGRFTISRDNARNTLYLQMSSLRSEDTAMYYCARRNYRRAMDYWGQGTSVTVSSAKTTAPSVYPLAPVCGDTTGSSVTLGCLVKGYFPEPVTLTWNSGSLSSGVHTFPAVLQSDLYTLSSSVTVTSSTWPSQSITCNVAHPASSTKVDKKIEPRGPTIKPCPPCKCPAPNLLGGPSVFIFPPKIKDVLMISLSPIVTCVVVDVSEDDPDVQISWFVNNVEVHTAQTQTHREDYNSTLRVVSALPIQHQDWMSGKEFKCKVNNKDLPAPIERTISKPKGSVRAPQVYVLPPPEEEMTKKQVTLTCMVTDFMPEDIYVEWTNNGKTELNYKNTEPVLDSDGSYFMYSKLRVEKKNWVERNSYSCSVVHEGLHNHHTTKSFSRTPGK

SEQ ID NO: 107 - protein, 218 aa, Mus musculus
  REGION 1..218: note = Description of sequence: I23RB78
  REGION 1..218: note = Description of type of peptide: Light Chain
DIVMTQSPASLAVSLGQRATISCRASESVDSYGISFMHWYQQKPGQPPKLLIYRASNLESGIPARFSGSGSRTDFTLTINPVEADDVATYYCQQSNEDPWTFGAGTGLEIKRADAAPTVSIFPPSSEQLTSGGASVVCFLNNFYPKDINVKWKIDGSERQNGVLNSWTDQDSKDSTYSMSSTLTLTKDEYERHNSYTCEATHKTSTSPIVKSFNRNEC

SEQ ID NO: 108 - protein, 450 aa, Mus musculus
  REGION 1..450: note = Description of sequence: I23RB79
  REGION 1..450: note = Description of type of peptide: Heavy Chain
DVQLQESGPELVRPGASVKMSCKASGYTFTDYYMNWVKQSHGKSLEWIGYIYPNNGDTVYNQKFKGKATLTVDKSSNTAYMELRSLTSEDSAVYYCARGTLTGMYYFDYWGQGTSVTVSSAKTTAPSVYPLAPVCGDTTGSSVTLGCLVKGYFPEPVTLTWNSGSLSSGVHTFPAVLQSDLYTLSSSVTVTSSTWPSQSITCNVAHPASSTKVDKKIEPRGPTIKPCPPCKCPAPNLLGGPSVFIFPPKIKDVLMISLSPIVTCVVVDVSEDDPDVQISWFVNNVEVHTAQTQTHREDYNSTLRVVSALPIQHQDWMSGKEFKCKVNNKDLPAPIERTISKPKGSVRAPQVYVLPPPEEEMTKKQVTLTCMVTDFMPEDIYVEWTNNGKTELNYKNTEPVLDSDGSYFMYSKLRVEKKNWVERNSYSCSVVHEGLHNHHTTKSFSRTPGK

SEQ ID NO: 109 - protein, 214 aa, Mus musculus
  REGION 1..214: note = Description of sequence: I23RB79
  REGION 1..214: note = Description of type of peptide: Light Chain
DIQMTQSPKFLHVSAGDRVTITCKASQSVINDVAWYQQKPGQSPKLLIYYASNRYTGVPDRFTGSGYGTDFTFTISTVQAEDLAIYFCQQDYSSPPTFGAGTRLEIKRADAAPTVSIFPPSSEQLTSGGASVVCFLNNFYPKDINVKWKIDGSERQNGVLNSWTDQDSKDSTYSMSSTLTLTKDEYERHNSYTCEATHKTSTSPIVKSFNRNEC

SEQ ID NO: 110 - protein, 447 aa, Mus musculus
  REGION 1..447: note = Description of sequence: I23RB80
  REGION 1..447: note = Description of type of peptide: Heavy Chain
DVQLQESGPGLVQPSQSLSITCTVSGFSLTSYGVHWVRQSPGKGLEWLGVIWSGVSTDYNAAFISRLSISKDNSKSQVFFKMNSLQADDTAIYYCARSRGSYYFDYWGQGTTLTVSSAKTTAPSVYPLAPVCGDTTGSSVTLGCLVKGYFPEPVTLTWNSGSLSSGVHTFPAVLQSDLYTLSSSVTVTSSTWPSQSITCNVAHPASSTKVDKKIEPRGPTIKPCPPCKCPAPNLLGGPSVFIFPPKIKDVLMISLSPIVTCVVVDVSEDDPDVQISWFVNNVEVHTAQTQTHREDYNSTLRVVSALPIQHQDWMSGKEFKCKVNNKDLPAPIERTISKPKGSVRAPQVYVLPPPEEEMTKKQVTLTCMVTDFMPEDIYVEWTNNGKTELNYKNTEPVLDSDGSYFMYSKLRVEKKNWVERNSYSCSVVHEGLHNHHTTKSFSRTPGK

SEQ ID NO: 111 - protein, 214 aa, Mus musculus
  REGION 1..214: note = Description of sequence: I23RB80
  REGION 1..214: note = Description of type of peptide: Light Chain
DIVMTQSQKFMSTSEGDRVNITCKASQNIRTAVAWYQQKPGQSPKPLIYLASNRHTGVPDRFTGSGSGTDFTLTISNVQSEDLAEYFCLQHWNYPLTFGAGTKLELKRADAAPTVSIFPPSSEQLTSGGASVVCFLNNFYPKDINVKWKIDGSERQNGVLNSWTDQDSKDSTYSMSSTLTLTKDEYERHNSYTCEATHKTSTSPIVKSFNRNEC

SEQ ID NO: 112 - protein, 451 aa, Mus musculus
  REGION 1..451: note = Description of sequence: I23RB81
  REGION 1..451: note = Description of type of peptide: Heavy Chain
DVQLQESGPGLVAPSQSLSITCTVSGFSLTSYAINWVRQPPGKGLEWLGVIWTGGGTNYNSALKSRLSISKDNSKSQLFLKMNSLQTDDTARYYCARNRDYSNYRWYFDVWGAGTSVTVSSAKTTAPSVYPLAPVCGDTTGSSVTLGCLVKGYFPEPVTLTWNSGSLSSGVHTFPAVLQSDLYTLSSSVTVTSSTWPSQSITCNVAHPASSTKVDKKIEPRGPTIKPCPPCKCPAPNLLGGPSVFIFPPKIKDVLMISLSPIVTCVVVDVSEDDPDVQISWFVNNVEVHTAQTQTHREDYNSTLRVVSALPIQHQDWMSGKEFKCKVNNKDLPAPIERTISKPKGSVRAPQVYVLPPPEEEMTKKQVTLTCMVTDFMPEDIYVEWTNNGKTELNYKNTEPVLDSDGSYFMYSKLRVEKKNWVERNSYSCSVVHEGLHNHHTTKSFSRTPGK

SEQ ID NO: 113 - protein, 214 aa, Mus musculus
  REGION 1..214: note = Description of sequence: I23RB81
  REGION 1..214: note = Description of type of peptide: Light Chain
DIVMTQSHKFMSTSVGDRVSIICKASQDVSTAVAWYQQKPGQSPKLLIYSASYRYTGVPDRFTGSGSGTDFTFTISSVQAEDLAVYYCQQHYSTPLTFGAGTRLEIKRADAAPTVSIFPPSSEQLTSGGASVVCFLNNFYPKDINVKWKIDGSERQNGVLNSWTDQDSKDSTYSMSSTLTLTKDEYERHNSYTCEATHKTSTSPIVKSFNRNEC

SEQ ID NO: 114 - protein, 450 aa, Mus musculus
  REGION 1..450: note = Description of sequence: I23RB82
  REGION 1..450: note = Description of type of peptide: Heavy Chain
QVQLKESGPGLVAPSQSLSITCTVSGFSLTNYALHWFRQSPGKGLEWLGVIWSDGSTDYNSPFISRLSISKDNSKSQVFFKMNSLQADDTAIYYCARSRSNYGRWYFDVWGAGTTLTVSSAKTTAPSVYPLAPVCGDTTGSSVTLGCLVKGYFPEPVTLTWNSGSLSSGVHTFPAVLQSDLYTLSSSVTVTSSTWPSQSITCNVAHPASSTKVDKKIEPRGPTIKPCPPCKCPAPNLLGGPSVFIFPPKIKDVLMISLSPIVTCVVVDVSEDDPDVQISWFVNNVEVHTAQTQTHREDYNSTLRVVSALPIQHQDWMSGKEFKCKVNNKDLPAPIERTISKPKGSVRAPQVYVLPPPEEEMTKKQVTLTCMVTDFMPEDIYVEWTNNGKTELNYKNTEPVLDSDGSYFMYSKLRVEKKNWVERNSYSCSVVHEGLHNHHTTKSFSRTPGK

SEQ ID NO: 115 - protein, 214 aa, Mus musculus
  REGION 1..214: note = Description of sequence: I23RB82
  REGION 1..214: note = Description of type of peptide: Light Chain
QIVLSQSHKFMSTSVGDRVSITCKASQDVSTAVAWYQQKPGQSPKLLIYSAFYRYTGVPDRFTGSGSGTDFTFTISSVQAEDLAVYYCQQHYSTPYTFGGGTKLEIKRADAAPTVSIFPPSSEQLTSGGASVVCFLNNFYPKDINVKWKIDGSERQNGVLNSWTDQDSKDSTYSMSSTLTLTKDEYERHNSYTCEATHKTSTSPIVKSFNRNEC

SEQ ID NO: 116 - protein, 451 aa, Mus musculus
  REGION 1..451: note = Description of sequence: I23RB83
  REGION 1..451: note = Description of type of peptide: Heavy Chain
DVQLQESGPGLVAPSQSLSITCTVSGFSLTNYDVHWVRQSPGKGLEWLGVIWSDGSTDYNAAFISRLSFSKDNSKRQVFFKMNSLQPDDTAIYYCARNNYYRYGRNPMDYWGQGTTVTVSSAKTTAPSVYPLAPVCGDTTGSSVTLGCLVKGYFPEPVTLTWNSGSLSSGVHTFPAVLQSDLYTLSSSVTVTSSTWPSQSITCNVAHPASSTKVDKKIEPRGPTIKPCPPCKCPAPNLLGGPSVFIFPPKIKDVLMISLSPIVTCVVVDVSEDDPDVQISWFVNNVEVHTAQTQTHREDYNSTLRVVSALPIQHQDWMSGKEFKCKVNNKDLPAPIERTISKPKGSVRAPQVYVLPPPEEEMTKKQVTLTCMVTDFMPEDIYVEWTNNGKTELNYKNTEPVLDSDGSYFMYSKLRVEKKNWVERNSYSCSVVHEGLHNHHTTKSFSRTPGK

SEQ ID NO: 117 - protein, 214 aa, Mus musculus
  REGION 1..214: note = Description of sequence: I23RB83
  REGION 1..214: note = Description of type of peptide: Light Chain
DIQMTQSPASQSASLGESVTITCLASQTIGSWLAWYQQKPGKSPQLLIYAATSLADGVPSRFSGSGSGTKFSFKISSLQAEDFVSYYCQQLYSSPLTFGGGTKLEIKRADAAPTVSIFPPSSEQLTSGGASVVCFLNNFYPKDINVKWKIDGSERQNGVLNSWTDQDSKDSTYSMSSTLTLTKDEYERHNSYTCEATHKTSTSPIVKSFNRNEC

SEQ ID NO: 118 - protein, 451 aa, Mus musculus
  REGION 1..451: note = Description of sequence: I23RB85
  REGION 1..451: note = Description of type of peptide: Heavy Chain
DVQLQESGPGLVAPSQSLSITCTVSGFSFNTYAITWVRQPPGRGLEWLGVLWPGGGISYNLALKSRLTISRDSSKSQVFLEMNSLQTDDTARYYCARNWRHYDGSYAMDFWGQGTSVTVSSAKTTAPSVYPLAPVCGDTTGSSVTLGCLVKGYFPEPVTLTWNSGSLSSGVHTFPAVLQSDLYTLSSSVTVTSSTWPSQSITCNVAHPASSTKVDKKIEPRGPTIKPCPPCKCPAPNLLGGPSVFIFPPKIKDVLMISLSPIVTCVVVDVSEDDPDVQISWFVNNVEVHTAQTQTHREDYNSTLRVVSALPIQHQDWMSGKEFKCKVNNKDLPAPIERTISKPKGSVRAPQVYVLPPPEEEMTKKQVTLTCMVTDFMPEDIYVEWTNNGKTELNYKNTEPVLDSDGSYFMYSKLRVEKKNWVERNSYSCSVVHEGLHNHHTTKSFSRTPGK

SEQ ID NO: 119 - protein, 219 aa, Mus musculus
  REGION 1..219: note = Description of sequence: I23RB85
  REGION 1..219: note = Description of type of peptide: Light Chain
DIVLTQSPLSLFVSLGDQASISCRSSQSLVHSNGNTYLHWYLQKPGQSPKLLIYKVSNRFSGVPDRFSGSGSGTDFTLKISRVEAEDLGVYFCSQSTHVPWTFGGGTRLEIKRADAAPTVSIFPPSSEQLTSGGASVVCFLNNFYPKDINVKWKIDGSERQNGVLNSWTDQDSKDSTYSMSSTLTLTKDEYERHNSYTCEATHKTSTSPIVKSFNRNEC

SEQ ID NO: 120 - protein, 449 aa, Mus musculus
  REGION 1..449: note = Description of sequence: I23RB86
  REGION 1..449: note = Description of type of peptide: Heavy Chain
EVQLQQSGAELVKPGASVKLSCKASGYTFTSYWLHWVKQRPGQGLEWIGEIDPSDSYTYYNQKFKGKATLTVDKSSSTAYMQLSSLTSEDSAVYYCARSPYDYDWGAYWGQGTSVTVSSAKTTAPSVYPLAPVCGDTTGSSVTLGCLVKGYFPEPVTLTWNSGSLSSGVHTFPAVLQSDLYTLSSSVTVTSSTWPSQSITCNVAHPASSTKVDKKIEPRGPTIKPCPPCKCPAPNLLGGPSVFIFPPKIKDVLMISLSPIVTCVVVDVSEDDPDVQISWFVNNVEVHTAQTQTHREDYNSTLRVVSALPIQHQDWMSGKEFKCKVNNKDLPAPIERTISKPKGSVRAPQVYVLPPPEEEMTKKQVTLTCMVTDFMPEDIYVEWTNNGKTELNYKNTEPVLDSDGSYFMYSKLRVEKKNWVERNSYSCSVVHEGLHNHHTTKSFSRTPGK

SEQ ID NO: 121 - protein, 214 aa, Mus musculus
  REGION 1..214: note = Description of sequence: I23RB86
  REGION 1..214: note = Description of type of peptide: Light Chain
DIVMTQSPSSMSVSLGDTVSITCHASQGISSNIGWLQQKPGKSFKGLIYHGTNLEDEVPSRFSGSGSGADYSLTIGSLESEDFADYYCVQYAQFPWTFGAGTKLEMKRADAAPTVSIFPPSSEQLTSGGASVVCFLNNFYPKDINVKWKIDGSERQNGVLNSWTDQDSKDSTYSMSSTLTLTKDEYERHNSYTCEATHKTSTSPIVKSFNRNEC

SEQ ID NO: 122 - protein, 448 aa, Mus musculus
  REGION 1..448: note = Description of sequence: I23RB87
  REGION 1..448: note = Description of type of peptide: Heavy Chain
EFQLQQSGPELVKPGTSVKMSCKASGYTFTNYVMHWVKQKPGQGLEWIGYINPYDASPKYNEKFKGKAILTSDKSSSTAYMELSSLTSEDSAVYYCTRDAKLDYFDYWGQGTTLTVSSAKTTAPSVYPLAPVCGDTTGSSVTLGCLVKGYFPEPVTLTWNSGSLSSGVHTFPAVLQSDLYTLSSSVTVTSSTWPSQSITCNVAHPASSTKVDKKIEPRGPTIKPCPPCKCPAPNLLGGPSVFIFPPKIKDVLMISLSPIVTCVVVDVSEDDPDVQISWFVNNVEVHTAQTQTHREDYNSTLRVVSALPIQHQDWMSGKEFKCKVNNKDLPAPIERTISKPKGSVRAPQVYVLPPPEEEMTKKQVTLTCMVTDFMPEDIYVEWTNNGKTELNYKNTEPVLDSDGSYFMYSKLRVEKKNWVERNSYSCSVVHEGLHNHHTTKSFSRTPGK

SEQ ID NO: 123 - protein, 214 aa, Mus musculus
  REGION 1..214: note = Description of sequence: I23RB87
  REGION 1..214: note = Description of type of peptide: Light Chain
DIVMTQTTSSLSASLGDRVTISCRASQDISNYLNWYQQKPDGTVKLLIYYTSRLHSGVPSRFSGSGSGTDFSLTISNLEQEDIATYFCQQGITLPWTFGAGTKLELKRADAAPTVSIFPPSSEQLTSGGASVVCFLNNFYPKDINVKWKIDGSERQNGVLNSWTDQDSKDSTYSMSSTLTLTKDEYERHNSYTCEATHKTSTSPIVKSFNRNEC

SEQ ID NO: 124 - protein, 448 aa, Mus musculus
  REGION 1..448: note = Description of sequence: I23RB91
  REGION 1..448: note = Description of type of peptide: Heavy Chain
EFQLQQFGPELLKPGASVKISCKASGYTFTDYIMHWVKQSHGKSLEWIGGISPNYGGTGYNGKFKDKATLTVDKSSSTAYMELRSLTSEDSAVYYCARFNNYYYFDYWGQGTTLTVSSAKTTAPSVYPLAPVCGDTTGSSVTLGCLVKGYFPEPVTLTWNSGSLSSGVHTFPAVLQSDLYTLSSSVTVTSSTWPSQSITCNVAHPASSTKVDKKIEPRGPTIKPCPPCKCPAPNLLGGPSVFIFPPKIKDVLMISLSPIVTCVVVDVSEDDPDVQISWFVNNVEVHTAQTQTHREDYNSTLRVVSALPIQHQDWMSGKEFKCKVNNKDLPAPIERTISKPKGSVRAPQVYVLPPPEEEMTKKQVTLTCMVTDFMPEDIYVEWTNNGKTELNYKNTEPVLDSDGSYFMYSKLRVEKKNWVERNSYSCSVVHEGLHNHHTTKSFSRTPGK

SEQ ID NO: 125 - protein, 214 aa, Mus musculus
  REGION 1..214: note = Description of sequence: I23RB91
  REGION 1..214: note = Description of type of peptide: Light Chain
DIKMTQSPSSMYASLGERVTITCKASQDINSYLSWCQQKPGKSPKALIYRANSLVDGVPSRFSGSGSGQDYSLTISSLEYEDMGIYYCLQYDEFPYTFGGGTKLEMKRADAAPTVSIFPPSSEQLTSGGASVVCFLNNFYPKDINVKWKIDGSERQNGVLNSWTDQDSKDSTYSMSSTLTLTKDEYERHNSYTCEATHKTSTSPIVKSFNRNEC

SEQ ID NO: 126 - protein, 449 aa, Mus musculus
  REGION 1..449: note = Description of sequence: I23RB92
  REGION 1..449: note = Description of type of peptide: Heavy Chain
EVQLQQSGPEVVKPGASVKISCKASGYTFTDHTMDWVKQSHGKNLEWIGYIYPKSGGTGYNQKFKNKATLTVDKSSSTAYMEFHSLTSDDSAVYYCARWGLRRDGFVYWGQGTLVTVSAAKTTAPSVYPLAPVCGDTTGSSVTLGCLVKGYFPEPVTLTWNSGSLSSGVHTFPAVLQSDLYTLSSSVTVTSSTWPSQSITCNVAHPASSTKVDKKIEPRGPTIKPCPPCKCPAPNLLGGPSVFIFPPKIKDVLMISLSPIVTCVVVDVSEDDPDVQISWFVNNVEVHTAQTQTHREDYNSTLRVVSALPIQHQDWMSGKEFKCKVNNKDLPAPIERTISKPKGSVRAPQVYVLPPPEEEMTKKQVTLTCMVTDFMPEDIYVEWTNNGKTELNYKNTEPVLDSDGSYFMYSKLRVEKKNWVERNSYSCSVVHEGLHNHHTTKSFSRTPGK

SEQ ID NO: 127 - protein, 218 aa, Mus musculus
  REGION 1..218: note = Description of sequence: I23RB92
  REGION 1..218: note = Description of type of peptide: Light Chain
DIKMTQSPASLAVSLGQRATISCRASQSVSTSKYDYIHWYQQKSGQPPRLLIKYASNLESGVPARFSGSGSGTDFTLNIHPVEEEDTATYYCQHTWEIPYTFGSGTKLELKRADAAPTVSIFPPSSEQLTSGGASVVCFLNNFYPKDINVKWKIDGSERQNGVLNSWTDQDSKDSTYSMSSTLTLTKDEYERHNSYTCEATHKTSTSPIVKSFNRNEC

SEQ ID NO: 128 - protein, 447 aa, Mus musculus
  REGION 1..447: note = Description of sequence: I23RB93
  REGION 1..447: note = Description of type of peptide: Heavy Chain
QVQLKESGPGLVQPSQSLSITCTVSGFSLTSYGVHWVRQSPGKGLEWLGVIWSGVSTDYNAAFISRLSISKDNSKSQVFFKMNSLQADDTAIYYCARSRGSYYFDYWGQGTTLTVSSAKTTAPSVYPLAPVCGDTTGSSVTLGCLVKGYFPEPVTLTWNSGSLSSGVHTFPAVLQSDLYTLSSSVTVTSSTWPSQSITCNVAHPASSTKVDKKIEPRGPTIKPCPPCKCPAPNLLGGPSVFIFPPKIKDVLMISLSPIVTCVVVDVSEDDPDVQISWFVNNVEVHTAQTQTHREDYNSTLRVVSALPIQHQDWMSGKEFKCKVNNKDLPAPIERTISKPKGSVRAPQVYVLPPPEEEMTKKQVTLTCMVTDFMPEDIYVEWTNNGKTELNYKNTEPVLDSDGSYFMYSKLRVEKKNWVERNSYSCSVVHEGLHNHHTTKSFSRTPGK

SEQ ID NO: 129 - protein, 214 aa, Mus musculus
  REGION 1..214: note = Description of sequence: I23RB93
  REGION 1..214: note = Description of type of peptide: Light Chain
DIKMTQSPATLSVTPGDSVSLFCRASQSISNNLHWYQQKSHESPRLLIKYASQSISGIPSRFSGSGSGTDFTLSINSVETEDFGMYFCQQSNSWPLTFGGGTKLEIKRADAAPTVSIFPPSSEQLTSGGASVVCFLNNFYPKDINVKWKIDGSERQNGVLNSWTDQDSKDSTYSMSSTLTLTKDEYERHNSYTCEATHKTSTSPIVKSFNRNEC

SEQ ID NO: 130 - protein, 453 aa, Mus musculus
  REGION 1..453: note = Description of sequence: I23RB94
  REGION 1..453: note = Description of type of peptide: Heavy Chain
DVQLQESGPELKKPGETVKISCKASGYTFTNYGMNWVRQAPGKSLKWMGWINTNTGEPAYAEEFKGRFAFSLETSASTAYLQINNLKNEDMATYFCARVRQTARATRGYFDVWGTGTTVTVSSAKTTAPSVYPLAPVCGDTTGSSVTLGCLVKGYFPEPVTLTWNSGSLSSGVHTFPAVLQSDLYTLSSSVTVTSSTWPSQSITCNVAHPASSTKVDKKIEPRGPTIKPCPPCKCPAPNLLGGPSVFIFPPKIKDVLMISLSPIVTCVVVDVSEDDPDVQISWFVNNVEVHTAQTQTHREDYNSTLRVVSALPIQHQDWMSGKEFKCKVNNKDLPAPIERTISKPKGSVRAPQVYVLPPPEEEMTKKQVTLTCMVTDFMPEDIYVEWTNNGKTELNYKNTEPVLDSDGSYFMYSKLRVEKKNWVERNSYSCSVVHEGLHNHHTTKSFSRTPGK

SEQ ID NO: 131 - protein, 214 aa, Mus musculus
  REGION 1..214: note = Description of sequence: I23RB94
  REGION 1..214: note = Description of type of peptide: Light Chain
DIVMTQSHKFMSTSVGDRVSITCKASQDVNTAVAWYQQKPGQSPKLLIYSAFYRYPGVPDRFTGSGSGTDFTFTINSVQAEDLAVYCCQQHYTSPLTFGDGTRLEIKRADAAPTVSIFPPSSEQLTSGGASVVCFLNNFYPKDINVKWKIDGSERQNGVLNSWTDQDSKDSTYSMSSTLTLTKDEYERHNSYTCEATHKTSTSPIVKSFNRNEC

SEQ ID NO: 132 - protein, 448 aa, Mus musculus
  REGION 1..448: note = Description of sequence: I23RB95
  REGION 1..448: note = Description of type of peptide: Heavy Chain
EVKLVESGGGLVQPGSSMKLSCTASGFTFSDYYMAWVRQVPEKGLEWVANINYDGSNTYYLDSLKSRFIISRDNAKNILYLQMSSLKSEDTATYYCAREGYDEAMDYWGQGTTLTVSSAKTTAPSVYPLAPVCGDTTGSSVTLGCLVKGYFPEPVTLTWNSGSLSSGVHTFPAVLQSDLYTLSSSVTVTSSTWPSQSITCNVAHPASSTKVDKKIEPRGPTIKPCPPCKCPAPNLLGGPSVFIFPPKIKDVLMISLSPIVTCVVVDVSEDDPDVQISWFVNNVEVHTAQTQTHREDYNSTLRVVSALPIQHQDWMSGKEFKCKVNNKDLPAPIERTISKPKGSVRAPQVYVLPPPEEEMTKKQVTLTCMVTDFMPEDIYVEWTNNGKTELNYKNTEPVLDSDGSYFMYSKLRVEKKNWVERNSYSCSVVHEGLHNHHTTKSFSRTPGK

SEQ ID NO: 133 - protein, 214 aa, Mus musculus
  REGION 1..214: note = Description of sequence: I23RB95
  REGION 1..214: note = Description of type of peptide: Light Chain
DIVLTQSHKFMSTSVGDRVSITCKASQDVGTAVAWYQQKPGQSPKLLIYWASTRHTGVPDRFTGSGSGTDFTLTISNVQSEDLADYFCQQYSTYPYTVGGGTKLEIKRADAAPTVSIFPPSSEQLTSGGASVVCFLNNFYPKDINVKWKIDGSERQNGVLNSWTDQDSKDSTYSMSSTLTLTKDEYERHNSYTCEATHKTSTSPIVKSFNRNEC

SEQ ID NO: 134 - protein, 449 aa, Mus musculus
  REGION 1..449: note = Description of sequence: I23RB98
  REGION 1..449: note = Description of type of peptide: Heavy Chain
EFQLQQSGPELVKPGASVKMSCKASGYTFTNYYMHWVKQSHGKTIEWIGYIYPNSGDTSYNQKFKGKATLTVDKSSSTAYMELRSLTSEDSAVYTCARFGGFYDAMDYWGQGTTVTVSSAKTTAPSVYPLAPVCGDTTGSSVTLGCLVKGYFPEPVTLTWNSGSLSSGVHTFPAVLQSDLYTLSSSVTVTSSTWPSQSITCNVAHPASSTKVDKKIEPRGPTIKPCPPCKCPAPNLLGGPSVFIFPPKIKDVLMISLSPIVTCVVVDVSEDDPDVQISWFVNNVEVHTAQTQTHREDYNSTLRVVSALPIQHQDWMSGKEFKCKVNNKDLPAPIERTISKPKGSVRAPQVYVLPPPEEEMTKKQVTLTCMVTDFMPEDIYVEWTNNGKTELNYKNTEPVLDSDGSYFMYSKLRVEKKNWVERNSYSCSVVHEGLHNHHTTKSFSRTPGK

SEQ ID NO: 135 - protein, 215 aa, Mus musculus
  REGION 1..215: note = Description of sequence: I23RB98
  REGION 1..215: note = Description of type of peptide: Light Chain
DIVLTQSPAIMSASLGERVTMTCTASSSVSSSYLHWYQQKPGSSPKLWIYSTSNLASGVPARFSGSGSGTSYSLTISSMEAEDAATYYCHQYHRSPFTFGSGTKLEMKRADAAPTVSIFPPSSEQLTSGGASVVCFLNNFYPKDINVKWKIDGSERQNGVLNSWTDQDSKDSTYSMSSTLTLTKDEYERHNSYTCEATHKTSTSPIVKSFNRNEC

SEQ ID NO: 136 - protein, 121 aa, Mus musculus
  REGION 1..121: note = Description of sequence: I23RB101
  REGION 1..121: note = Description of type of peptide: Heavy chain variable region
EVQLQQSGAEVKKPGSSVKVSCKASGGTFSSYAISWVRQAPGQGLEWMGWINPNSGGTNYAQKFQGRVTMTRDTSISTAYMELSRLRSDDTAVYYCARGYRYGPLDGFDIWGQGTTLTVSS

SEQ ID NO: 137 - protein, 107 aa, Mus musculus
  REGION 1..107: note = Description of sequence: I23RB101
  REGION 1..107: note = Description of type of peptide: Lightchain variable region
DIVMTQSHKFMSTSIGDRVSITCKTSQDVRTAVAWYQQKPGQSPKLLIYSASYRYIGVPDRFTGSGSGTDFTFTISDVQAEDLALYYCQQHYSTPYTFGGGTKLEIK

SEQ ID NO: 138 - protein, 117 aa, Mus musculus
  REGION 1..117: note = Description of sequence: I23RB102
  REGION 1..117: note = Description of type of peptide: Heavy chain variable region
QVQLQQPGAELVKPGASVKVSCKASGYTFTKYWINWMNQRPGQGLEWIGNIYPGSISTNYNEKFKSKVTLTVDISSSTAYMQLSSLTSDDSAVYYCARGDFYALDYWGQGTTLTVSS

SEQ ID NO: 139 - protein, 107 aa, Mus musculus
  REGION 1..107: note = Description of sequence: I23RB102
  REGION 1..107: note = Description of type of peptide: Lightchain variable region
DIQMTQSPASLSVSVGETVTITCRASENIYSHITWYQLKQGKSPQLLVYASTNLADDVPSRFSGSGSGTQYSLKINSLLSEDFGTYYCQHFWGTPWTFGGGTKLEMK

SEQ ID NO: 140 - protein, 121 aa, Mus musculus
  REGION 1..121: note = Description of sequence: I23RB104
  REGION 1..121: note = Description of type of peptide: Heavy chain variable region
EVKLVESGGGLVKPGGSLKLSCAASGFTFSSYAMSWVRQTPEKRLDWVASISTGGSTYYPDSVKGGFTISRDIARNTLSLQMTSLRSEDTAMYYCARGPHYYGGSYPFAYWGQGTTLTVSS

SEQ ID NO: 141 - protein, 107 aa, Mus musculus
  REGION 1..107: note = Description of sequence: I23RB104
  REGION 1..107: note = Description of type of peptide: Lightchain variable region
DIQMTQSPASLSVSVGETVTITCRASENIYSNLAWYQQKQGKSPQLLVYAATNLADGVPSRFSGSGSGTQYSLKINSLQSEDFGSYYCQHFWGTPPTFGSGTKLEIK

SEQ ID NO: 142 - protein, 123 aa, Mus musculus
  REGION 1..123: note = Description of sequence: I23RB144
  REGION 1..123: note = Description of type of peptide: Heavy chain variable region
EVQLQQSGPELVKPGASVKMSCKASGYTFTSYIIHWVKQKPGQGLEWIGYIDPYNDDTKYNEKFKGKATLTSDKSSSTAYMEFSSLTSEDSAVYYCARLGSINYYDGSYFDYWGQGTSVTVSS

SEQ ID NO: 143 - protein, 112 aa, Mus musculus
  REGION 1..112: note = Description of sequence: I23RB144
  REGION 1..112: note = Description of type of peptide: Lightchain variable region
DIVMTQSPLTLSVIIGQSASISCKSSQSLLDSDGKTYLNWLLQRPGQSPKRLMYLVSKLDSGVPDRFTGSGSGTDFTLKISRVEAEDLGVYYCWQGIHFPLTFGSGTRLEIK

SEQ ID NO: 144 - protein, 118 aa, Mus musculus
  REGION 1..118: note = Description of sequence: I23RB148
  REGION 1..118: note = Description of type of peptide: Heavy chain variable region
DVQLQESGPDLVKPSQSLSLTCTVTGYSITSGYNWHWIRQFPGNKLEWMGYIHSSGTTNYSPSLRSRLSITRDTSKNQFFLQLNSVTTEDTATYYCTRQLGLKAMEYWGQGTTLTVSS

SEQ ID NO: 145 - protein, 107 aa, Mus musculus
  REGION 1..107: note = Description of sequence: I23RB148
  REGION 1..107: note = Description of type of peptide: Lightchain variable region
DIVMTQSHKFMSTSVGDRVSLTCKASQEVRTAVAWYQQKPGQPPKLLIYSASYRYTGVPDRFTGSGSGTDFTFTIISVQAEDLAVYYCQQHYTTPYSFGSGTKLEIK

SEQ ID NO: 146 - protein, 118 aa, Mus musculus
  REGION 1..118: note = Description of sequence: I23RB149
  REGION 1..118: note = Description of type of peptide: Heavy chain variable region
DVQLQESGPDLVKPSQSLSLTCTVTGYSITSGYNWHWIRQFPGNKLEWMGYIHFSDRTNYNPSLKSRISITRDTSKNQFFLQLNSVTSEDTATYYCSRQLGLKALDYWGQGTTLTVSS

SEQ ID NO: 147 - protein, 112 aa, Mus musculus
  REGION 1..112: note = Description of sequence: I23RB149
  REGION 1..112: note = Description of type of peptide: Lightchain variable region
DVQMIQSPLSLPVSLGDQASISCRSSQSLVHSNGNTYLHWYLQKPGQSPKLLIYKVSNRFSGVPDRFSGSGSGTDFTLKISRVEAEDLGVYFCSQSTHVPLTFGAGTRLEIK

SEQ ID NO: 148 - protein, 121 aa, Mus musculus
  REGION 1..121: note = Description of sequence: I23RB150
  REGION 1..121: note = Description of type of peptide: Heavy chain variable region
QIQLVQSGPELKKPGETVKISCKASAYTFTNYGMNWVKQAPGKGLKWMGWIKTNTGEPTYAEEFKGRFAFSLETSASTAYLQINNLKNEDTATYFCARSRQLGLRYYFDYWGQGTTLTVSS

SEQ ID NO: 149 - protein, 107 aa, Mus musculus
  REGION 1..107: note = Description of sequence: I23RB150
  REGION 1..107: note = Description of type of peptide: Lightchain variable region
DIVMTQSHKFMSTSVGGRVSITCKASQDVSTAVAWYQQKPGQSPRLLIYSASYRYTGVPDRFTGSGSGTDFTFTISSVQAEDLAVFYCQQHYSTPYTFGSGTRLEIK

SEQ ID NO: 150 - protein, 117 aa, Mus musculus
  REGION 1..117: note = Description of sequence: I23RB153
  REGION 1..117: note = Description of type of peptide: Heavy chain variable region
EVKLVESGGGLVQPGGSLKLSCAASGFTFSSDTMSWVRQTPEKRLELVAEISSNGGSTYHIDTVKGRFTISRDNAKNTLYLQMSSLKSEDTAMYYCASPGYPWFAYWGQGTTVTVSA

SEQ ID NO: 151 - protein, 107 aa, Mus musculus
  REGION 1..107: note = Description of sequence: I23RB153
  REGION 1..107: note = Description of type of peptide: Lightchain variable region
DIVMTQSHRFMSTSVGERVSITCKASQDVGNAVAWYQQKPGQSPKLLIYWTSTRHNGVPDRFTGSGSGTDFTLTISNVQGEDLADYFCQQYNRYPLTFGSGTKLEIK

SEQ ID NO: 152 - protein, 123 aa, Mus musculus
  REGION 1..123: note = Description of sequence: I23RB155
  REGION 1..123: note = Description of type of peptide: Heavy chain variable region
QVQLKESGPGLVKPSQSLSLTCSVTGYSITSGHSWNWIRQFPGNKLEWMGYISYDGTNDYNPSLKNRISITRDTSKNQFFLNLNSVTTEDTVTYYCARGGGYYGGTYRVFADWGQGTTLTVSS

SEQ ID NO: 153 - protein, 111 aa, Mus musculus
  REGION 1..111: note = Description of sequence: I23RB155
  REGION 1..111: note = Description of type of peptide: Lightchain variable region
QIVLSQSPASLAVSLGQRATISCRTSESVDTYGNSFIYWYQQKPGQPPKLLIYRASNLESGIPARFSGSGSRTDFTLTINPVEADDVATYYCQQGNKDPYTFGSGTKLEMK

SEQ ID NO: 154 - protein, 121 aa, Mus musculus
  REGION 1..121: note = Description of sequence: I23RB156
  REGION 1..121: note = Description of type of peptide: Heavy chain variable region
QVQLKESGPGLVAPSQSLSITCTVSGFSLTSYAINWVRQPPGKGLEWLGVIWTGGGTNYNSVFKSRLSISKDNSKSQIFLKMISLQTDDTARYYCARNRDYSNYRWYFDVWGAGTTLTVSS

SEQ ID NO: 155 - protein, 107 aa, Mus musculus
  REGION 1..107: note = Description of sequence: I23RB156
  REGION 1..107: note = Description of type of peptide: Lightchain variable region
DIVMTQSHKFMSTSVGDRVSITCKASQDVSTAVAWYQQKPGRSPKLLIYSAFYRYTGVPDRFTGSGSGTDFTFTIGSVQAEDLAVYYCQQHYSIPLTFGAGTKLELK

SEQ ID NO: 156 - protein, 122 aa, Mus musculus
  REGION 1..122: note = Description of sequence: I23RB157
  REGION 1..122: note = Description of type of peptide: Heavy chain variable region
EVKLVESGGGSVKPGGSLKLSCAASGFTFSRYTMSWVRQTPEKRLEWVAYISTGGGDTYYPDSVKGRFTISRDNARNTLYLQMSSLRSEDTAMYYCARRTSYSYYNYVFDYWGQGTTLTVSS

SEQ ID NO: 157 - protein, 111 aa, Mus musculus
  REGION 1..111: note = Description of sequence: I23RB157
  REGION 1..111: note = Description of type of peptide: Lightchain variable region
DIVMTQSPASLAVSLGQRATISCRASESVDNYGISFMNWFQQKPGQPPKLLIYAASNQGSGVPARFSGSGSGTDFSLNIHPMEEDDTAMYFCQQSKEVPWTFGAGTKLELK

SEQ ID NO: 158 - protein, 120 aa, Mus musculus
  REGION 1..120: note = Description of sequence: I23RB159
  REGION 1..120: note = Description of type of peptide: Heavy chain variable region
EVQLQQSGGGLVKPGGSLKLSCAASGFTFSDYGMAWVRQTPRKGPEWIAFISNLAYSVYYSDTVTGRFTISRENAKNTLYLEMSSLRSEDTAMYYCARHGDYRNYGFAYWGLGTTVTVSS

SEQ ID NO: 159 - protein, 107 aa, Mus musculus
  REGION 1..107: note = Description of sequence: I23RB159
  REGION 1..107: note = Description of type of peptide: Lightchain variable region
DIVMTQTTSSLSASLGDRVTISCRASQDISNYLNWYQQKPDGTVKLLIYYTSRLHSGVPSRFSGSGSGTDYSLTISNLEQEDIATYFCQQGNTLPWTFGAGTKLELK

SEQ ID NO: 160 - protein, 118 aa, Mus musculus
  REGION 1..118: note = Description of sequence: I23RB160
  REGION 1..118: note = Description of type of peptide: Heavy chain variable region
QVQLKESGPDLVKPSQSLSLTCTVTGYSITSGYNWHWIRQFPGNKLEWMGYIHYSSGTIYNPSLKSRISITRDTSKNQFFLQLNSVTTEDTGTYYCARQLGLKAMDYWGQGTSVTVSS

SEQ ID NO: 161 - protein, 107 aa, Mus musculus
  REGION 1..107: note = Description of sequence: I23RB160
  REGION 1..107: note = Description of type of peptide: Lightchain variable region
DIVMTQSHKFMSTSVGDRVSITCKASQDVRTAVAWYQQKPGQSPKLLIHSASYRYTGVPDRFTGSGSGTDFTFTISSVQVEDLAVYYCQQHYTTPYTFGSGTKLEIK

SEQ ID NO: 162 - protein, 119 aa, Mus musculus
  REGION 1..119: note = Description of sequence: I23RB161
  REGION 1..119: note = Description of type of peptide: Heavy chain variable region
EFQLQQSGPELVKPGASVKISCKASVYAFSSSWMNWVKQRPGKGLEWIGRIYPGDGDTNYNGKFKGKATLTADKSSSTAYMQLSSLTSEDSAVYFCARRYDFGSAMDYWGQGTSVTVSS

SEQ ID NO: 163 - protein, 106 aa, Mus musculus
  REGION 1..106: note = Description of sequence: I23RB161
  REGION 1..106: note = Description of type of peptide: Lightchain variable region
DIVMTQSPAILSASPGEKVTMTCRASSSVSYMHWYQQKPGSSPKPWIYATSDLASGAPARFSGSGSGTSYSLTISRVEAEDAATYYCQQWSSNPPTFGGGTKLEIK

SEQ ID NO: 164 - protein, 120 aa, Mus musculus
  REGION 1..120: note = Description of sequence: I23RB162
  REGION 1..120: note = Description of type of peptide: Heavy chain variable region
EFQLQQSGPELVKPGASVKMSCKASGYTFTNYVMHWVKQKPGQGLEWIGYINPYNDGTKYNEKFKGKATLTSDKSSSTAYMELSSLTSEDSAVYYCARSRTGTRWYFDVWGAGTTVTVSS

SEQ ID NO: 165 - protein, 107 aa, Mus musculus
  REGION 1..107: note = Description of sequence: I23RB162
  REGION 1..107: note = Description of type of peptide: Lightchain variable region
DIVMTQSQKFMSTSVGDRVSVTCKASQNVGTNVAWYQQKPGQSPKALIYSASYRYSGVPDRFTGSGSGTDFTLTISNVQSEDLAEYFCQQYNSYPFTFGSGTKLEIK

SEQ ID NO: 166 - protein, 118 aa, Mus musculus
  REGION 1..118: note = Description of sequence: I23RB165
  REGION 1..118: note = Description of type of peptide: Heavy chain variable region
EVQLQQSGAELVRPGASVKLSCTASGFNIKDSLMHWVKQRPEQGLEWIGWIDPEDGKTKYAPKFQDKATITADTSSNTAYLQLSSLTSEDTAIYYCARREVLDYFDYWGQGTTLTVSS

SEQ ID NO: 167 - protein, 111 aa, Mus musculus
  REGION 1..111: note = Description of sequence: I23RB165
  REGION 1..111: note = Description of type of peptide: Lightchain variable region
DIVMTQSPASLAVSLGQRATISCRASKSVSTSGYSYMHWYQQKPGQPPKLLIYLASNLESGVPARFSGSGSGTDFTLNIHPVEEEDAATYYCQHSRELPLTFGAGTKLEMK

SEQ ID NO: 168 - protein, 122 aa, Mus musculus
  REGION 1..122: note = Description of sequence: I23RB166
  REGION 1..122: note = Description of type of peptide: Heavy chain variable region
DVQLQESGPGLVKPSQTVSLTCTVTGYSITNGNHWWNWIRQVSGSKLEWIGYIRSSGSTDSNPSLKSRISITRDTSKNQLFLQLNSVTAEDIATYYCARERLRLRWSYFDYWGQGTTLTVSS

SEQ ID NO: 169 - protein, 107 aa, Mus musculus
  REGION 1..107: note = Description of sequence: I23RB166
  REGION 1..107: note = Description of type of peptide: Lightchain variable region
DIVMTQSHKFMSTSVGARVSITCKASQDVSTAVAWYQQKPGQSPKLLIYSASYRYTGVPDRFTGSGSGTDFTFTISSVQAEDLAVYYCQQHYSTPRTFGGGTKLEIK

SEQ ID NO: 170 - protein, 117 aa, Mus musculus
  REGION 1..117: note = Description of sequence: I23RB168
  REGION 1..117: note = Description of type of peptide: Heavy chain variable region
QIQLVQSGPELVKPGASVKMSCKTSGYTFTDYYINWVKQRPGQGLEWIGWIYPAINNTNYNEKFKGKATLTVDTSSRTAYMQLNSLTSEDSAVYFCAISRKPYFDYWGQGTTLTVSS

SEQ ID NO: 171 - protein, 107 aa, Mus musculus
  REGION 1..107: note = Description of sequence: I23RB168
  REGION 1..107: note = Description of type of peptide: Lightchain variable region
DIQMTQSSSSFSVSLGDRVTITCKASEDLYNRLAWYQQKPGNAPRLLISGATSLGTGVLSRFSGSGSGKDYTLSITSLQTEDVATYYCQQYWSIPWTFGAGTKLELK

SEQ ID NO: 172 - protein, 119 aa, Mus musculus
  REGION 1..119: note = Description of sequence: I23RB169
  REGION 1..119: note = Description of type of peptide: Heavy chain variable region
QIQLVQSGPELKKPGETVKISCKASGYTFTTVGMQWVQKMPGKGFKWIGWINTHSGEPKYTDDFKGRFAFSLETSASTAYLQISNLKSEDTATYFCARSSALTGAFAYWGQGTLVTVSS

SEQ ID NO: 173 - protein, 111 aa, Mus musculus
  REGION 1..111: note = Description of sequence: I23RB169
  REGION 1..111: note = Description of type of peptide: Lightchain variable region
DIKMTQSPASLAVSLGQRATISCRASKSVSTSDYSYMHWYQQKPGQPPKLLIYLASNLESGVPARFSGSGSGTDFTLNIHPVEEEDAATYYCQHSRELPRTFGAGTKLELK

SEQ ID NO: 174 - protein, 121 aa, Mus musculus
  REGION 1..121: note = Description of sequence: I23RB173
  REGION 1..121: note = Description of type of peptide: Heavy chain variable region
DVQLQESGPGLVKPSQSLSLTCSVTGYSITSGYYWNWIRQFPGNKLEWMGYISYDGGNNYNPSLKNRISITRDTSKNQFFLKLNSVTTEDTATYYCARDAGLLPYYAMDYWGQGTTLTVSS

SEQ ID NO: 175 - protein, 106 aa, Mus musculus
  REGION 1..106: note = Description of sequence: I23RB173
  REGION 1..106: note = Description of type of peptide: Lightchain variable region
DIKMTQSPAIMSASPGEKVTITCSASSSVSYMHWFQQKPGTSPKLWIYSTSNLASGVPARFSGSGSGTSYSLTISRMEAEDAATYYCQQRSSYPLTFGDGTKLEMK

SEQ ID NO: 176 - protein, 116 aa, Mus musculus
  REGION 1..116: note = Description of sequence: I23RB177
  REGION 1..116: note = Description of type of peptide: Heavy chain variable region
EVQLQQSGPELLKPGASVKISCKASGYTITDYTMHWVKQSHGKSLEWIGGINPNYGGTSYNEKFKDKATLTVDKSSSTAYMELRSLTSEDSAVFYCVRGNIYFDYWGQGTTLTVSS

SEQ ID NO: 177 - protein, 107 aa, Mus musculus
  REGION 1..107: note = Description of sequence: I23RB177
  REGION 1..107: note = Description of type of peptide: Lightchain variable region
NTQMTQSPSSMYASLGERVTITCKASQDINSYLSWFQQKPGKSPKALIYRANRLVDGVPSRFSGSGSGQDYSLTISSLEYEDMGIYYCQQYDEFPRTFGAGTKLELK

SEQ ID NO: 178 - protein, 120 aa, Mus musculus
  REGION 1..120: note = Description of sequence: I23RB180
  REGION 1..120: note = Description of type of peptide: Heavy chain variable region
QVTLKESGPGILQPSQTLSLTCSFSGFSLSTYGMGVGWIRQPSGKGLEWLANIWWNDSKYHNAALKSRLTISKDTSKNQVFLKIASVDTADTATYYCGRIDGYYECVDVWGTGTSVTVSS

SEQ ID NO: 179 - protein, 109 aa, Mus musculus
  REGION 1..109: note = Description of sequence: I23RB180
  REGION 1..109: note = Description of type of peptide: Lightchain variable region
DIQMTQSPASLSASVGETVTITCRASVNIHNYLAWYQQKQGKSPQLLVYNAKTLADGVPSRFSGSGSGTQYSLKINSLQPEDFGSYYCQHFWTTPYMYTFGAGTKLELK

SEQ ID NO: 180 - protein, 117 aa, Mus musculus
  REGION 1..117: note = Description of sequence: I23RB182
  REGION 1..117: note = Description of type of peptide: Heavy chain variable region
EVQLQQSGPGLVKPSQSLSLTCSVTGYSITSGYFWNWLRQFPGSKLEWMGFIDNDGSNDYNPSLKNRISITRDTSKNQFFLRLNSVTTEDTATYYCARGRLGFFDSWGPGTTLTVSS

SEQ ID NO: 181 - protein, 106 aa, Mus musculus
  REGION 1..106: note = Description of sequence: I23RB182
  REGION 1..106: note = Description of type of peptide: Lightchain variable region
DIVMTQSPAIMSASLGEKVTMSCRASSSVNYMYWYQQKSDASPKLWIYYTSNLAPGVPARFSGSGSGNSYSLTISSMEGEDAATYYCQQFTNSPWTFGAGTKLELK

SEQ ID NO: 182 - protein, 121 aa, Mus musculus
  REGION 1..121: note = Description of sequence: I23RB188
  REGION 1..121: note = Description of type of peptide: Heavy chain variable region
QIQLVQSGPELKKPGETVKISCKASGYTFTNYGMNWVKQAPGKGLKWMGWINTYTGAPTYADDFKGRFAFSLETSASTAYLQINNFKNEDTATYFCARGNGYPYYYGINYWGQGTSVTVSS

SEQ ID NO: 183 - protein, 107 aa, Mus musculus
  REGION 1..107: note = Description of sequence: I23RB188
  REGION 1..107: note = Description of type of peptide: Lightchain variable region
DVQMIQSPSSLSASLGERVSLTCRASQEISGNLSWLQQKPDGTIKRLIYAASTLDSGVPKRFSGSRSGSDYSLTISSLESEDFADYYCLQYASYPWTFGAGTRLEIK

SEQ ID NO: 184 - protein, 118 aa, Mus musculus; identical to SEQ ID NO: 144
  REGION 1..118: note = Description of sequence: I23RB189
  REGION 1..118: note = Description of type of peptide: Heavy chain variable region

SEQ ID NO: 185 - protein, 107 aa, Mus musculus
  REGION 1..107: note = Description of sequence: I23RB189
  REGION 1..107: note = Description of type of peptide: Lightchain variable region
DIVLTQSPKSMSMSVGERVTLSCKASENVGTYVSWYQQKPEQSPKLLMYGASNRYTGVPDRFTGSGSATDFTLTISSVQAEDLADYHCGQSYSYPPTFGGGTKLEIK

SEQ ID NO: 186 - protein, 117 aa, Mus musculus
  REGION 1..117: note = Description of sequence: I23RB27
  REGION 1..117: note = Description of type of peptide: Heavy chain variable region
QVQLKESGPDLVQPSQTLSLTCTVSGFSLTSYGVHWVRQPPGKGLEWVGTLGWDDKKSYNSALKSRLSISRDTSKSQVFLKLSSLQTEDTAMYYCTKEDVSYAMDFWGQGTTLTVSS

SEQ ID NO: 187 - protein, 111 aa, Mus musculus
  REGION 1..111: note = Description of sequence: I23RB27
  REGION 1..111: note = Description of type of peptide: Lightchain variable region
DIQMTQSPTSLAVSLGQRATISCRASESVEYYGTSLMHWYQQKPGQPPKLLIYAASNVESGVPARFSGSGSGTDFSLNIHPVEEEDIAMYFCQQGKKVPWTFGAGTKLEMK

SEQ ID NO: 188 - protein, 120 aa, Mus musculus
  REGION 1..120: note = Description of sequence: I23RB30
  REGION 1..120: note = Description of type of peptide: Heavy chain variable region
QVTLKESGPGILQPSQTLSLTCSFSGFSLSTSGMGVSWIRQPSGKGLEWLAHIYWDDDKRYNPSLKSRLTISKDTSSNQIFLKITSVDTADTATYYCARRTLGGPPFDYWGQGTTLTVSS

SEQ ID NO: 189 - protein, 107 aa, Mus musculus
  REGION 1..107: note = Description of sequence: I23RB30
  REGION 1..107: note = Description of type of peptide: Lightchain variable region
DIVLTQSQRFMSTSVGDRVSITCKASQNIRTAVAWYQQKPGQSPKALIYLPSNRHTGVPDRFTGSGSGTDFTLTISNVQSEDLADYFCLQHWNYPLTFGAGTKLELK

SEQ ID NO: 190 - protein, 120 aa, Mus musculus
  REGION 1..120: note = Description of sequence: I23RB31
  REGION 1..120: note = Description of type of peptide: Heavy chain variable region
EFQLQQSGAEMVRPGASVKLSCKASGYTFTGYWMNWVKQRPGQGLEWIGKIDPSDTETHYNQNFKDKATLTVDKSSSTAYMQLNSLTSEDSAVYYCARWGLGRNFAMDYWGQGTTLTVSS

SEQ ID NO: 191 - protein, 107 aa, Mus musculus
  REGION 1..107: note = Description of sequence: I23RB31
  REGION 1..107: note = Description of type of peptide: Lightchain variable region
DIVLTQSPATLSVTPGDRVSLSCRASQSISDHLHWYQQKSHESPRLLIKFASQSISGIPSRFSGSGSGSDFTLSIDSVEPEDVGVYYCQNGHSFPLTFGSGTKLEIK

SEQ ID NO: 192 - protein, 120 aa, Mus musculus
  REGION 1..120: note = Description of sequence: I23RB32
  REGION 1..120: note = Description of type of peptide: Heavy chain variable region
EFQLQQSGPELVKPGASVKLSCKASGYTFTDYALHWVKQSPGQGLEWIGWIYPGGGNTYYNDKFKGKATMTADKSSSTAYMQLSSLTSEDSAVYFCARGRLRRDYPMDYWGQGTSVTVSS

SEQ ID NO: 193 - protein, 113 aa, Mus musculus
  REGION 1..113: note = Description of sequence: I23RB32
  REGION 1..113: note = Description of type of peptide: Lightchain variable region
DIVMTQSPSSLTVTAGEKVTMSCKSSQSLLNSGNQKNYLTWYQQKPGQPPKLLIYWASTRESGVPDRFTGSGSGTDFTLTISSVQAEDLAVYYCQNDYTYPLTFGSGTKLEIK

SEQ ID NO: 194 - protein, 121 aa, Mus musculus
  REGION 1..121: note = Description of sequence: I23RB33
  REGION 1..121: note = Description of type of peptide: Heavy chain variable region
EVQLQQSGAELVKPGASVKLSCTASGFNIRDIYIHWVKQRPEQGLEWIGRIDPANGHSIYAAKFQGKATITADTSLNIAYMQLSSLTSGDTAVYYCARGSDNDYGRVLAYWGLGTSVTVSS

SEQ ID NO: 195 - protein, 109 aa, Mus musculus
  REGION 1..109: note = Description of sequence: I23RB33
  REGION 1..109: note = Description of type of peptide: Lightchain variable region
DIVLTQSPAIMSASPGEKVTMTCRASSSVRSSYLHWYQQKSGASPKLWIYSTSNLASGVPARFSGSGSGTSYSLTITSVEAEDAATYYCQQYTGNPIFTFGSGTKLELK

SEQ ID NO: 196 - protein, 123 aa, Mus musculus
  REGION 1..123: note = Description of sequence: I23RB35
  REGION 1..123: note = Description of type of peptide: Heavy chain variable region
DVQLQESGPGLVKPSQSLSLTCSVTGYSITSGHNWNWIRQFPGNKLEWLGYISYDGSNNYDPSLKNRISITRDTSKNQFFLKLNSVTTEDTATYYCARGGGYFGNSYRVFASWGQGTTVTVSS

SEQ ID NO: 197 - protein, 111 aa, Mus musculus
  REGION 1..111: note = Description of sequence: I23RB35
  REGION 1..111: note = Description of type of peptide: Lightchain variable region
DIVLTQSPASLAVSLGQRATISCRASESVDSYGNSFMHWYQQKPGQPPKLLIYRASNLESEIPARFSGRGSGTDFTLTINPVEADDVATYYCQQSNADPYTFGGGTKLEIK

SEQ ID NO: 198 - protein, 116 aa, Mus musculus
  REGION 1..116: note = Description of sequence: I23RB36
  REGION 1..116: note = Description of type of peptide: Heavy chain variable region
QIQLVQSGAELVKPGASVKLSCTTSGFNIKDTYIHWMKQRPEQGLEWIGRIDPANGNTIYASKFQGKATLTTDTSSNTAYMLLSSLTSGDTAVYYCTRGTSWFAYWGQGTTVTVSS

SEQ ID NO: 199 - protein, 107 aa, Mus musculus
  REGION 1..107: note = Description of sequence: I23RB36
  REGION 1..107: note = Description of type of peptide: Lightchain variable region
DIVMTQSPKSMSMSVGERVTLSCKASENVGTSVSWFQQKPEQSPKLLIYGASNRYTGVPDRFTGSGSATDFTLTISSVQAEDLADYHCGQSYSYPRTFGGGTKLEIK

SEQ ID NO: 200 - protein, 120 aa, Mus musculus
  REGION 1..120: note = Description of sequence: I23RB39
  REGION 1..120: note = Description of type of peptide: Heavy chain variable region
EVQLQQSGPELVKPGAPVKISCKASGYTFTNYYIHWVKQRPGQGLEWIGYIYPGNGGTAYNQKFKDKATLTADNPSSTAYMQLSSLTSEDSAVYFCARSRGGSRNYFDYWGQGTTLTVSS

SEQ ID NO: 201 - protein, 107 aa, Mus musculus
  REGION 1..107: note = Description of sequence: I23RB39
  REGION 1..107: note = Description of type of peptide: Lightchain variable region
DIQMTQSHKFMSTSVGDRVSITCKASQDVSTAVAWYQQKPGQSPKLLIYSAFYRYTGVPDRFTGSGSGTDFTFTISSVQAEDLAVYYCQQHYSSPRTFGAGTKLELK

SEQ ID NO: 202 - protein, 121 aa, Mus musculus
  REGION 1..121: note = Description of sequence: I23RB42
  REGION 1..121: note = Description of type of peptide: Heavy chain variable region
EVQLQQSGAELVKPGASVKISCKASGYSFTDYIMNWVKQSHGKSLEWIGNINPYFGFTSYNQEFKGKATLTVDKSSSTAYMLLNSLTSEDSAVYYCSRGSYYGYETFFDYWGQGTTLTVSS

SEQ ID NO: 203 - protein, 112 aa, Mus musculus
  REGION 1..112: note = Description of sequence: I23RB42
  REGION 1..112: note = Description of type of peptide: Lightchain variable region
DIVLTQTAPSVPVTPGESVSISCRSSKSLLHSNGNTYLYWFLQRPGQSPQLLIYRMSNLASGVPDRFSGSGSGTAFTLRISRVEAEDVGVYYCMQHLEYPYTFGSGTRLEIK

SEQ ID NO: 204 - protein, 124 aa, Mus musculus
  REGION 1..124: note = Description of sequence: I23RB45
  REGION 1..124: note = Description of type of peptide: Heavy chain variable region
QVTLKESGPGILQPSQTLSLTCSFSGFSLSTYGMGVSWIRQPSGKGLEWLAHIYWDDDKRYNPSLKSRLTISKDTSNNQVFLKITSVDTADTATYYCAQRALPLLGQKAPFDYWGQGTTLTVSS

SEQ ID NO: 205 - protein, 107 aa, Mus musculus
  REGION 1..107: note = Description of sequence: I23RB45
  REGION 1..107: note = Description of type of peptide: Lightchain variable region
DIVLTQSQKFISTSVGDRVSITCKASQNVRTAVAWYQQKPGQSPKLLIYLPSNRHTGVPDRFTGSGSGTVFTLTISNVQSEDQADYFCLQHWNYPLTFGAGTKLELK

SEQ ID NO: 206 - protein, 121 aa, Mus musculus
  REGION 1..121: note = Description of sequence: I23RB47
  REGION 1..121: note = Description of type of peptide: Heavy chain variable region
QVQLKESGPGLVAPSQSLSITCTVSGFSLTNYDIHWVRQSPGKGLEWLGVIWSDGRTDYKGAFISRLSISKDNSKSQVFFKMNSLQADDTAIYYCARNNYYRYGRNTMDYWGQGTSVTVSS

SEQ ID NO: 207 - protein, 107 aa, Mus musculus
  REGION 1..107: note = Description of sequence: I23RB47
  REGION 1..107: note = Description of type of peptide: Lightchain variable region
DIVLTQSPASQSASLGESVTITCLASQTIGSWLAWYQQKPGKSPQLLIYAATRLADGVPSRFSGSGSGTKFSFKISSLQAEDFVFYYCHQLYSIPLTFGGGTKLEMK

SEQ ID NO: 208 - protein, 118 aa, Mus musculus
  REGION 1..118: note = Description of sequence: I23RB51
  REGION 1..118: note = Description of type of peptide: Heavy chain variable region
QVQLQQSGPDLVKPSQSLSLTCTVTGYSITSGYNWHWIRQFPGNKLEWMGYVHYRDSTHYNPSLKSRISITRDTSKNQFFLQLNSVTTEDTATYYCARQLGLKAMDYWGQGTSVTVSS

SEQ ID NO: 209 - protein, 106 aa, Mus musculus
  REGION 1..106: note = Description of sequence: I23RB51
  REGION 1..106: note = Description of type of peptide: Lightchain variable region
DIVLTQSPASLSASVGETVTITCRASGNIHNYLAWYQHKQGKSPQLLVYNAKTLADGVPSRFSGSGSGTQYSLKINSLQPEDFGSYYCQYFWTTRTFGAGTKLELK

SEQ ID NO: 210 - protein, 119 aa, Mus musculus
  REGION 1..119: note = Description of sequence: I23RB54
  REGION 1..119: note = Description of type of peptide: Heavy chain variable region
EVQLQQSGGGLVKPGGSLKLSCAASGFTFSSYAMSWVRQTPEKRLEWVAGISSGGSYIYYPDNVKGRFTISRDNARNTLYLQMSSLRSEDTAMYYCARKKSDYGAMDYWGQGTTLTVSS

SEQ ID NO: 211 - protein, 107 aa, Mus musculus
  REGION 1..107: note = Description of sequence: I23RB54
  REGION 1..107: note = Description of type of peptide: Lightchain variable region
DIQMTQSPKFLLVSAGDRVTITCKASQSVSNDVAWYQQKPGQSPRLLIYYASNRYTGVPDRFTGSGYGTDFTFTISTVQAEDLAVYFCQQDYSSLPTFGAGTKLEMK

SEQ ID NO: 212 - protein, 122 aa, Mus musculus
  REGION 1..122: note = Description of sequence: I23RB56
  REGION 1..122: note = Description of type of peptide: Heavy chain variable region
EVKLVESGGGLVKPGGSLKLSCAASGFTFSSYAMSWVRQTPEKRLEWVAAINSNDGSTYYPDTVKDRFTISRDNAKNTLYLQMSSLRSEDTALYYCARHFLYFSNFYYFDYWGQGTTLTVSS

SEQ ID NO: 213 - protein, 107 aa, Mus musculus
  REGION 1..107: note = Description of sequence: I23RB56
  REGION 1..107: note = Description of type of peptide: Lightchain variable region
DIVMTQSPKFLLVSAGDRVTITCKASQSVSNDVAWYQQKPGQSPKLLIYYASNRYTGVPDRFTGSGYGTVFTFTISTVQAEDLAVYFCQQDYSSPFTFGSGTKLEIK

SEQ ID NO: 214 - protein, 119 aa, Mus musculus
  REGION 1..119: note = Description of sequence: I23RB57
  REGION 1..119: note = Description of type of peptide: Heavy chain variable region
EFQLQQSGPELVKPGASVKMSCKASGYTFTNYYMHWVKQSHGKTIEWIGYIYPNSGDTSYNQKFKGKATLTVDKSSSTAYMELRSLTSEDSAVYNCARFGGFYDAMDYWGQGTSVTVSS

SEQ ID NO: 215 - protein, 108 aa, Mus musculus
  REGION 1..108: note = Description of sequence: I23RB57
  REGION 1..108: note = Description of type of peptide: Lightchain variable region
DIVMTQSPAIMSASLGERVTMTCTASSSVSSSYLHWYQQKPGSSPKLWIYSTSNLASGVPARFSGSGSGTSYSLTISSMEAEDAATYYCHQYHRSPFTFGSGTKLEIK

SEQ ID NO: 216 - protein, 127 aa, Mus musculus
  REGION 1..127: note = Description of sequence: I23RB58
  REGION 1..127: note = Description of type of peptide: Heavy chain variable region
EVKLVESGGGLVKPGGSLKLSCAASGFSFIIYTMSWVRQTPEKRLEWVAYITSGGGITYYPDSVKGRFTISRDNARNTLYLQMSSLRSEDTAMYYCARHEGDYYDDYYRIGYAMDYWGQGTSVTVSS

SEQ ID NO: 217 - protein, 111 aa, Mus musculus
  REGION 1..111: note = Description of sequence: I23RB58
  REGION 1..111: note = Description of type of peptide: Lightchain variable region
DIVMTQTPASLAVSLGQRATISCRASESVDSYGNSFMHWYQQKPGQPPKLLIYRASNLESGIPARFSGSGSRTDFTLTINPVEADDVATYYCQQSNEDPLTFGAGTKLEMK

SEQ ID NO: 218 - protein, 117 aa, Mus musculus
  REGION 1..117: note = Description of sequence: I23RB60
  REGION 1..117: note = Description of type of peptide: Heavy chain variable region
DVQLQESGPELVKPGDSVKMSCEASGYTFTDYYIDWVKQSHGKSLEWIGYIYPNNGGISFNQKFEGKATLTVDKSSSTAYMELHSLTSEDSAVYYCAREKLRGRDYWGQGTTLTVSS

SEQ ID NO: 219 - protein, 107 aa, Mus musculus
  REGION 1..107: note = Description of sequence: I23RB60
  REGION 1..107: note = Description of type of peptide: Lightchain variable region
DIVMTQSTSSLSASLGDRVTISCRASQDIRNNLNWYQQKPDGTVKLLIFYSSRLHSGVPSRFSGSGSGTDYSLTISNLEQEDIATYFCQQGHTLPWTFGAGTKLELK

SEQ ID NO: 220 - protein, 119 aa, Mus musculus
  REGION 1..119: note = Description of sequence: I23RB61
  REGION 1..119: note = Description of type of peptide: Heavy chain variable region
DVQLQESGAELVKPGASVKLSCKSFDYTFTSFDINWMKQRPGQGLEWIGWIFPGSGTTNYNEKFKGKATLTADKSSSTAYMHLTSLTSEDSAVYFCARRLTGTRYFDVWGTGTTLTVSS

SEQ ID NO: 221 - protein, 107 aa, Mus musculus
  REGION 1..107: note = Description of sequence: I23RB61
  REGION 1..107: note = Description of type of peptide: Lightchain variable region
DIQMTQSHKFLSTSVGDRITITCKASQDVITAVAWYQQKSGQSPKLLIYWASTRHTGVPDRFTGSGSGTDYTLTISNVQAEDLALYYCQQHYTTPPTFGAGTKLELK

SEQ ID NO: 222 - protein, 119 aa, Mus musculus
  REGION 1..119: note = Description of sequence: I23RB65
  REGION 1..119: note = Description of type of peptide: Heavy chain variable region
EVQLQQSGPELVKPGASVKISCKASGYTFTDHTMDWVKQSHGKSLEWIGYIYPKSGNAAYSQKFKSEATLTVDKSSSTAYMEFHSLTSEDSAVYYCARWGLRRDGFTYWGQGTSVTVSS

SEQ ID NO: 223 - protein, 111 aa, Mus musculus
  REGION 1..111: note = Description of sequence: I23RB65
  REGION 1..111: note = Description of type of peptide: Lightchain variable region
QIVLTQSPASLAVSLGQRATISCRASQSVSTSSYNYIHWYQQKPGQPPKLLIKYASNLESGVPARFSGSGSGTDFTLNIHPVEEDDTATYYCQHTWEIPYTFGSGTKLEIK

SEQ ID NO: 224 - protein, 120 aa, Mus musculus
  REGION 1..120: note = Description of sequence: I23RB66
  REGION 1..120: note = Description of type of peptide: Heavy chain variable region
QVTLKESGPGILQPSQTLSLTCSFSGFSLSTSNMGIGWIRQPSGKGLEWLAHIWWNSDKYYNPSLKSRLTISKDTSNNQVFLTITSVDTADTATYYCAQIRWLRFYFDYWGQGTTVTVSS

SEQ ID NO: 225 - protein, 107 aa, Mus musculus
  REGION 1..107: note = Description of sequence: I23RB66
  REGION 1..107: note = Description of type of peptide: Lightchain variable region
DIVMTQSHKFMSTSVGDRVSITCKASQDVSTAVAWYQQKPGQSPKLLIYSASYRYTGVPDRFTGSGSGTDFTFTFSSVQAEDLAVYYCQQHYSTPYTFGGGTKLEIK

SEQ ID NO: 226 - protein, 120 aa, Mus musculus
  REGION 1..120: note = Description of sequence: I23RB67
  REGION 1..120: note = Description of type of peptide: Heavy chain variable region
EVQLQQSGAELVKPGASVKLSCKASGYTFTSYWINWVKQRPGQGLEWIGNIYPGSSSTNYNEKFKSKATLTVDTSSSTAYMQLSSLTSDDSAVYYCARSAYGNRLAMDYWGQGTTLTVSS

SEQ ID NO: 227 - protein, 107 aa, Mus musculus
  REGION 1..107: note = Description of sequence: I23RB67
  REGION 1..107: note = Description of type of peptide: Lightchain variable region
DVVMTQSHKFMSTSVGDRVSITCKASQDVSTAVAWYQQKPGQSPKLLIYSAFYRYTGVPDRFTGSGSGTDFTFTISSVQAEDLAVYYCQQHYSTPYTFGGGTKLELK

SEQ ID NO: 228 - protein, 118 aa, Mus musculus
  REGION 1..118: note = Description of sequence: I23RB69
  REGION 1..118: note = Description of type of peptide: Heavy chain variable region
EVQLQQSGAELVKPGASVKISCKASGYSFTGYNMNWVKQSHGKSLEWIGNINPFYDKTSYNQKFKGKATLTVDKASSTAYMQLNSLTSEDSAVYYCARQLGLKGFAYWGQGTLVTVSA

SEQ ID NO: 229 - protein, 107 aa, Mus musculus
  REGION 1..107: note = Description of sequence: I23RB69
  REGION 1..107: note = Description of type of peptide: Lightchain variable region
DIVMTQSHKFMSTSVGDRVSITCKASQDVSTAVAWYQQKPGQSPKLLIYSASYRYTGVPDRFTGSGSGTDFTFTISSVQAEDLAVYYCQQHYSTPWTFGGGTKLEMK

SEQ ID NO: 230 - protein, 118 aa, Mus musculus
  REGION 1..118: note = Description of sequence: I23RB71
  REGION 1..118: note = Description of type of peptide: Heavy chain variable region
DVQLQESGPDLVKPSQSLSLTCTVTDYSITRGYNWHWIRQFPGNKLEWMGYIHYSGSTNYNPSLKSRISITRDTSKNQFFLQLNSVTTEDTATYYCARQYGLKAMDYWGQGTSVTVSS

SEQ ID NO: 231 - protein, 107 aa, Mus musculus
  REGION 1..107: note = Description of sequence: I23RB71
  REGION 1..107: note = Description of type of peptide: Lightchain variable region
DIVMTQSHKFMSTSVGDRVSITCKASQDVITAVAWYQQKPGQSPKLLIYSASYRYTGVPDRFTGSGSGTDFTFTISSVQAEDLAVYFCQQHFGTPYTFGSGTKLEMK

SEQ ID NO: 232 - protein, 123 aa, Mus musculus
  REGION 1..123: note = Description of sequence: I23RB73
  REGION 1..123: note = Description of type of peptide: Heavy chain variable region
EVQLQQSGAELVKPGASVKISCKASGYTFTDHAIHWVKQRPEQGLEWIGYISLGNGDIKYSEKFRGKATLTADKTSNTAYMQLNSLTSEDSAVYFCKRSRVLRWTTYWYFDVWGAGTSVTVSS

SEQ ID NO: 233 - protein, 107 aa, Mus musculus
  REGION 1..107: note = Description of sequence: I23RB73
  REGION 1..107: note = Description of type of peptide: Lightchain variable region
DIVMTQSHKFMSTSVGDRVSITCKASQDVSTAVAWYQQKPGQSPKLLIYWASTRLTGVPDRFTGSGSGTDYTLTISSVQAEDLALYYCQQYYNTPLTFGAGTKLELK

SEQ ID NO: 234 - protein, 122 aa, Mus musculus
  REGION 1..122: note = Description of sequence: I23RB74
  REGION 1..122: note = Description of type of peptide: Heavy chain variable region
DVQLQESGPGLVKPSQSLSLTCSVTGYSITSGYYWNWIRQFPGNKLEWMGYISYDGSFNYNPSLKNRLSITRDTSMNQFFLKLNSVTSEDTATYYCARAEIYYDYDGDFDYWGQGTTLTVSS

SEQ ID NO: 235 - protein, 111 aa, Mus musculus
  REGION 1..111: note = Description of sequence: I23RB74
  REGION 1..111: note = Description of type of peptide: Lightchain variable region
DIVLTQSPASLAVSLGQRATISCRASKSVSTSGSNFLHWYQQKPGQPPKLLIYFASNLESGVPARFSGSGSGTDFTLNIHPVEEEDAATYYCQHSRELPHTFGAGTKLELK

SEQ ID NO: 236 - protein, 118 aa, Mus musculus
  REGION 1..118: note = Description of sequence: I23RB76
  REGION 1..118: note = Description of type of peptide: Heavy chain variable region
EVQLQQSGPELVKPGASVKMSCKASGYTFTDYYMNWMKQSHGKSLEWIGYISPKNGRTGYNQKFKGKATLTVDKSSTTAYMELRSLTSEDSAVYYCAKSNGYYALDYWGQGTTVTVSS

SEQ ID NO: 237 - protein, 107 aa, Mus musculus
  REGION 1..107: note = Description of sequence: I23RB76
  REGION 1..107: note = Description of type of peptide: Lightchain variable region
DIVLTQSPATLCVTPGETVSLSCRASQNIYKNLHWFQQKSHRSPRLLIKYASDSISGIPSRFTGSGSGTDYTLSINSVKPEDEGIYYCLQGYSTPWTFGGGTKLEIK

SEQ ID NO: 238 - protein, 120 aa, Mus musculus
  REGION 1..120: note = Description of sequence: I23RB77
  REGION 1..120: note = Description of type of peptide: Heavy chain variable region
DVQLQESGPGLVAPSQSLSITCTVSGFSLSRYSVHWVRQPPGKGLEWLGMIWGSGSTDYNSALKSRLSINKDNSKSQVFLKMNSLQTDDTAMYYCARVYYGGSPYAMDYWGQGTTVTVSS

SEQ ID NO: 239 - protein, 111 aa, Mus musculus
  REGION 1..111: note = Description of sequence: I23RB77
  REGION 1..111: note = Description of type of peptide: Lightchain variable region
DIVMTQSPASLALSLGQRATISCRASESVDSYGNSFMHWYQQKPGQPPKLLIYLASNLESGVPARFSGSGSRTDFTLTIDPVEADDAAIYYCQQNNEEPNTFGAGTKLEMK

SEQ ID NO: 240 - protein, 118 aa, Mus musculus
  REGION 1..118: note = Description of sequence: I23RB78
  REGION 1..118: note = Description of type of peptide: Heavy chain variable region
EFQLQQSGGGLVKPGGSLKLSCAASGFTFSNYTMSWVRQTPEKRLKWVACISSGGGNTYYPDSVKGRFTISRDNARNTLYLQMSSLRSEDTAMYYCARRNYRRAMDYWGQGTSVTVSS

SEQ ID NO: 241 - protein, 111 aa, Mus musculus
  REGION 1..111: note = Description of sequence: I23RB78
  REGION 1..111: note = Description of type of peptide: Lightchain variable region
DIVMTQSPASLAVSLGQRATISCRASESVDSYGISFMHWYQQKPGQPPKLLIYRASNLESGIPARFSGSGSRTDFTLTINPVEADDVATYYCQQSNEDPWTFGAGTGLEIK

SEQ ID NO: 242 - protein, 120 aa, Mus musculus
  REGION 1..120: note = Description of sequence: I23RB79
  REGION 1..120: note = Description of type of peptide: Heavy chain variable region
DVQLQESGPELVRPGASVKMSCKASGYTFTDYYMNWVKQSHGKSLEWIGYIYPNNGDTVYNQKFKGKATLTVDKSSNTAYMELRSLTSEDSAVYYCARGTLTGMYYFDYWGQGTSVTVSS

SEQ ID NO: 243 - protein, 107 aa, Mus musculus
  REGION 1..107: note = Description of sequence: I23RB79
  REGION 1..107: note = Description of type of peptide: Lightchain variable region
DIQMTQSPKFLHVSAGDRVTITCKASQSVINDVAWYQQKPGQSPKLLIYYASNRYTGVPDRFTGSGYGTDFTFTISTVQAEDLAIYFCQQDYSSPPTFGAGTRLEIK

SEQ ID NO: 244 - protein, 117 aa, Mus musculus
  REGION 1..117: note = Description of sequence: I23RB80
  REGION 1..117: note = Description of type of peptide: Heavy chain variable region
DVQLQESGPGLVQPSQSLSITCTVSGFSLTSYGVHWVRQSPGKGLEWLGVIWSGVSTDYNAAFISRLSISKDNSKSQVFFKMNSLQADDTAIYYCARSRGSYYFDYWGQGTTLTVSS

SEQ ID NO: 245 - protein, 107 aa, Mus musculus
  REGION 1..107: note = Description of sequence: I23RB80
  REGION 1..107: note = Description of type of peptide: Lightchain variable region
DIVMTQSQKFMSTSEGDRVNITCKASQNIRTAVAWYQQKPGQSPKPLIYLASNRHTGVPDRFTGSGSGTDFTLTISNVQSEDLAEYFCLQHWNYPLTFGAGTKLELK

SEQ ID NO: 246 - protein, 121 aa, Mus musculus
  REGION 1..121: note = Description of sequence: I23RB81
  REGION 1..121: note = Description of type of peptide: Heavy chain variable region
DVQLQESGPGLVAPSQSLSITCTVSGFSLTSYAINWVRQPPGKGLEWLGVIWTGGGTNYNSALKSRLSISKDNSKSQLFLKMNSLQTDDTARYYCARNRDYSNYRWYFDVWGAGTSVTVSS

SEQ ID NO: 247 - protein, 107 aa, Mus musculus
  REGION 1..107: note = Description of sequence: I23RB81
  REGION 1..107: note = Description of type of peptide: Lightchain variable region
DIVMTQSHKFMSTSVGDRVSIICKASQDVSTAVAWYQQKPGQSPKLLIYSASYRYTGVPDRFTGSGSGTDFTFTISSVQAEDLAVYYCQQHYSTPLTFGAGTRLEIK

SEQ ID NO: 248 - protein, 120 aa, Mus musculus
  REGION 1..120: note = Description of sequence: I23RB82
  REGION 1..120: note = Description of type of peptide: Heavy chain variable region
QVQLKESGPGLVAPSQSLSITCTVSGFSLTNYALHWFRQSPGKGLEWLGVIWSDGSTDYNSPFISRLSISKDNSKSQVFFKMNSLQADDTAIYYCARSRSNYGRWYFDVWGAGTTLTVSS

SEQ ID NO: 249 - protein, 107 aa, Mus musculus
  REGION 1..107: note = Description of sequence: I23RB82
  REGION 1..107: note = Description of type of peptide: Lightchain variable region
QIVLSQSHKFMSTSVGDRVSITCKASQDVSTAVAWYQQKPGQSPKLLIYSAFYRYTGVPDRFTGSGSGTDFTFTISSVQAEDLAVYYCQQHYSTPYTFGGGTKLEIK

SEQ ID NO: 250 - protein, 121 aa, Mus musculus
  REGION 1..121: note = Description of sequence: I23RB83
  REGION 1..121: note = Description of type of peptide: Heavy chain variable region
DVQLQESGPGLVAPSQSLSITCTVSGFSLTNYDVHWVRQSPGKGLEWLGVIWSDGSTDYNAAFISRLSFSKDNSKRQVFFKMNSLQPDDTAIYYCARNNYYRYGRNPMDYWGQGTTVTVSS

SEQ ID NO: 251 - protein, 107 aa, Mus musculus
  REGION 1..107: note = Description of sequence: I23RB83
  REGION 1..107: note = Description of type of peptide: Lightchain variable region
DIQMTQSPASQSASLGESVTITCLASQTIGSWLAWYQQKPGKSPQLLIYAATSLADGVPSRFSGSGSGTKFSFKISSLQAEDFVSYYCQQLYSSPLTFGGGTKLEIK

SEQ ID NO: 252 - protein, 121 aa, Mus musculus
  REGION 1..121: note = Description of sequence: I23RB85
  REGION 1..121: note = Description of type of peptide: Heavy chain variable region
DVQLQESGPGLVAPSQSLSITCTVSGFSFNTYAITWVRQPPGRGLEWLGVLWPGGGISYNLALKSRLTISRDSSKSQVFLEMNSLQTDDTARYYCARNWRHYDGSYAMDFWGQGTSVTVSS

SEQ ID NO: 253 - protein, 112 aa, Mus musculus
  REGION 1..112: note = Description of sequence: I23RB85
  REGION 1..112: note = Description of type of peptide: Lightchain variable region
DIVLTQSPLSLFVSLGDQASISCRSSQSLVHSNGNTYLHWYLQKPGQSPKLLIYKVSNRFSGVPDRFSGSGSGTDFTLKISRVEAEDLGVYFCSQSTHVPWTFGGGTRLEIK

SEQ ID NO: 254 - protein, 119 aa, Mus musculus
  REGION 1..119: note = Description of sequence: I23RB86
  REGION 1..119: note = Description of type of peptide: Heavy chain variable region
EVQLQQSGAELVKPGASVKLSCKASGYTFTSYWLHWVKQRPGQGLEWIGEIDPSDSYTYYNQKFKGKATLTVDKSSSTAYMQLSSLTSEDSAVYYCARSPYDYDWGAYWGQGTSVTVSS

SEQ ID NO: 255 - protein, 107 aa, Mus musculus
  REGION 1..107: note = Description of sequence: I23RB86
  REGION 1..107: note = Description of type of peptide: Lightchain variable region
DIVMTQSPSSMSVSLGDTVSITCHASQGISSNIGWLQQKPGKSFKGLIYHGTNLEDEVPSRFSGSGSGADYSLTIGSLESEDFADYYCVQYAQFPWTFGAGTKLEMK

SEQ ID NO: 256 - protein, 118 aa, Mus musculus
  REGION 1..118: note = Description of sequence: I23RB87
  REGION 1..118: note = Description of type of peptide: Heavy chain variable region
EFQLQQSGPELVKPGTSVKMSCKASGYTFTNYVMHWVKQKPGQGLEWIGYINPYDASPKYNEKFKGKAILTSDKSSSTAYMELSSLTSEDSAVYYCTRDAKLDYFDYWGQGTTLTVSS

SEQ ID NO: 257 - protein, 107 aa, Mus musculus
  REGION 1..107: note = Description of sequence: I23RB87
  REGION 1..107: note = Description of type of peptide: Lightchain variable region
DIVMTQTTSSLSASLGDRVTISCRASQDISNYLNWYQQKPDGTVKLLIYYTSRLHSGVPSRFSGSGSGTDFSLTISNLEQEDIATYFCQQGITLPWTFGAGTKLELK

SEQ ID NO: 258 - protein, 118 aa, Mus musculus
  REGION 1..118: note = Description of sequence: I23RB91
  REGION 1..118: note = Description of type of peptide: Heavy chain variable region
EFQLQQFGPELLKPGASVKISCKASGYTFTDYIMHWVKQSHGKSLEWIGGISPNYGGTGYNGKFKDKATLTVDKSSSTAYMELRSLTSEDSAVYYCARFNNYYYFDYWGQGTTLTVSS

SEQ ID NO: 259 - protein, 107 aa, Mus musculus
  REGION 1..107: note = Description of sequence: I23RB91
  REGION 1..107: note = Description of type of peptide: Lightchain variable region
DIKMTQSPSSMYASLGERVTITCKASQDINSYLSWCQQKPGKSPKALIYRANSLVDGVPSRFSGSGSGQDYSLTISSLEYEDMGIYYCLQYDEFPYTFGGGTKLEMK

SEQ ID NO: 260 - protein, 119 aa, Mus musculus
  REGION 1..119: note = Description of sequence: I23RB92
  REGION 1..119: note = Description of type of peptide: Heavy chain variable region
EVQLQQSGPEVVKPGASVKISCKASGYTFTDHTMDWVKQSHGKNLEWIGYIYPKSGGTGYNQKFKNKATLTVDKSSSTAYMEFHSLTSDDSAVYYCARWGLRRDGFVYWGQGTLVTVSA

SEQ ID NO: 261 - protein, 111 aa, Mus musculus
  REGION 1..111: note = Description of sequence: I23RB92
  REGION 1..111: note = Description of type of peptide: Lightchain variable region
DIKMTQSPASLAVSLGQRATISCRASQSVSTSKYDYIHWYQQKSGQPPRLLIKYASNLESGVPARFSGSGSGTDFTLNIHPVEEEDTATYYCQHTWEIPYTFGSGTKLELK

SEQ ID NO: 262 - protein, 117 aa, Mus musculus
  REGION 1..117: note = Description of sequence: I23RB93
  REGION 1..117: note = Description of type of peptide: Heavy chain variable region
QVQLKESGPGLVQPSQSLSITCTVSGFSLTSYGVHWVRQSPGKGLEWLGVIWSGVSTDYNAAFISRLSISKDNSKSQVFFKMNSLQADDTAIYYCARSRGSYYFDYWGQGTTLTVSS

SEQ ID NO: 263 - protein, 107 aa, Mus musculus
  REGION 1..107: note = Description of sequence: I23RB93
  REGION 1..107: note = Description of type of peptide: Lightchain variable region
DIKMTQSPATLSVTPGDSVSLFCRASQSISNNLHWYQQKSHESPRLLIKYASQSISGIPSRFSGSGSGTDFTLSINSVETEDFGMYFCQQSNSWPLTFGGGTKLEIK

SEQ ID NO: 264 - protein, 123 aa, Mus musculus
  REGION 1..123: note = Description of sequence: I23RB94
  REGION 1..123: note = Description of type of peptide: Heavy chain variable region
DVQLQESGPELKKPGETVKISCKASGYTFTNYGMNWVRQAPGKSLKWMGWINTNTGEPAYAEEFKGRFAFSLETSASTAYLQINNLKNEDMATYFCARVRQTARATRGYFDVWGTGTTVTVSS

SEQ ID NO: 265 - protein, 107 aa, Mus musculus
  REGION 1..107: note = Description of sequence: I23RB94
  REGION 1..107: note = Description of type of peptide: Lightchain variable region
DIVMTQSHKFMSTSVGDRVSITCKASQDVNTAVAWYQQKPGQSPKLLIYSAFYRYPGVPDRFTGSGSGTDFTFTINSVQAEDLAVYCCQQHYTSPLTFGDGTRLEIK

SEQ ID NO: 266 - protein, 118 aa, Mus musculus
  REGION 1..118: note = Description of sequence: I23RB95
  REGION 1..118: note = Description of type of peptide: Heavy chain variable region
EVKLVESGGGLVQPGSSMKLSCTASGFTFSDYYMAWVRQVPEKGLEWVANINYDGSNTYYLDSLKSRFIISRDNAKNILYLQMSSLKSEDTATYYCAREGYDEAMDYWGQGTTLTVSS

SEQ ID NO: 267 - protein, 107 aa, Mus musculus
  REGION 1..107: note = Description of sequence: I23RB95
  REGION 1..107: note = Description of type of peptide: Lightchain variable region
DIVLTQSHKFMSTSVGDRVSITCKASQDVGTAVAWYQQKPGQSPKLLIYWASTRHTGVPDRFTGSGSGTDFTLTISNVQSEDLADYFCQQYSTYPYTVGGGTKLEIK

SEQ ID NO: 268 - protein, 119 aa, Mus musculus
  REGION 1..119: note = Description of sequence: I23RB98
  REGION 1..119: note = Description of type of peptide: Heavy chain variable region
EFQLQQSGPELVKPGASVKMSCKASGYTFTNYYMHWVKQSHGKTIEWIGYIYPNSGDTSYNQKFKGKATLTVDKSSSTAYMELRSLTSEDSAVYTCARFGGFYDAMDYWGQGTTVTVSS

SEQ ID NO: 269 - protein, 108 aa, Mus musculus
  REGION 1..108: note = Description of sequence: I23RB98
  REGION 1..108: note = Description of type of peptide: Lightchain variable region
DIVLTQSPAIMSASLGERVTMTCTASSSVSSSYLHWYQQKPGSSPKLWIYSTSNLASGVPARFSGSGSGTSYSLTISSMEAEDAATYYCHQYHRSPFTFGSGTKLEMK

SEQ ID NO: 270 - protein, 8 aa, Mus musculus
  REGION 1..8: note = Description of sequence: I23RB101
  REGION 1..8: note = Description of type of peptide: HCDR1
GGTFSSYA

SEQ ID NO: 271 - protein, 8 aa, Mus musculus
  REGION 1..8: note = Description of sequence: I23RB101
  REGION 1..8: note = Description of type of peptide: HCDR2
INPNSGGT

SEQ ID NO: 272 - protein, 14 aa, Mus musculus
  REGION 1..14: note = Description of sequence: I23RB101
  REGION 1..14: note = Description of type of peptide: HCDR3
ARGYRYGPLDGFDI

SEQ ID NO: 273 - protein, 6 aa, Mus musculus
  REGION 1..6: note = Description of sequence: I23RB101
  REGION 1..6: note = Description of type of peptide: LCDR1
QDVRTA

SEQ ID NO: 274 - skipped

SEQ ID NO: 275 - protein, 9 aa, Mus musculus
  REGION 1..9: note = Description of sequence: I23RB101
  REGION 1..9: note = Description of type of peptide: LCDR3
QQHYSTPYT

SEQ ID NO: 276 - protein, 8 aa, Mus musculus
  REGION 1..8: note = Description of sequence: I23RB102
  REGION 1..8: note = Description of type of peptide: HCDR1
GYTFTKYW

SEQ ID NO: 277 - protein, 8 aa, Mus musculus
  REGION 1..8: note = Description of sequence: I23RB102
  REGION 1..8: note = Description of type of peptide: HCDR2
IYPGSIST

SEQ ID NO: 278 - protein, 10 aa, Mus musculus
  REGION 1..10: note = Description of sequence: I23RB102
  REGION 1..10: note = Description of type of peptide: HCDR3
ARGDFYALDY

SEQ ID NO: 279 - protein, 6 aa, Mus musculus
  REGION 1..6: note = Description of sequence: I23RB102
  REGION 1..6: note = Description of type of peptide: LCDR1
ENIYSH

SEQ ID NO: 280 - skipped

SEQ ID NO: 281 - protein, 9 aa, Mus musculus
  REGION 1..9: note = Description of sequence: I23RB102
  REGION 1..9: note = Description of type of peptide: LCDR3
QHFWGTPWT

SEQ ID NO: 282 - protein, 8 aa, Mus musculus
  REGION 1..8: note = Description of sequence: I23RB104
  REGION 1..8: note = Description of type of peptide: HCDR1
GFTFSSYA

SEQ ID NO: 283 - protein, 7 aa, Mus musculus
  REGION 1..7: note = Description of sequence: I23RB104
  REGION 1..7: note = Description of type of peptide: HCDR2
ISTGGST

SEQ ID NO: 284 - protein, 15 aa, Mus musculus
  REGION 1..15: note = Description of sequence: I23RB104
  REGION 1..15: note = Description of type of peptide: HCDR3
ARGPHYYGGSYPFAY

SEQ ID NO: 285 - protein, 6 aa, Mus musculus
  REGION 1..6: note = Description of sequence: I23RB104
  REGION 1..6: note = Description of type of peptide: LCDR1
ENIYSN

SEQ ID NO: 286 - skipped

SEQ ID NO: 287 - protein, 9 aa, Mus musculus
  REGION 1..9: note = Description of sequence: I23RB104
  REGION 1..9: note = Description of type of peptide: LCDR3
QHFWGTPPT

SEQ ID NO: 288 - protein, 8 aa, Mus musculus
  REGION 1..8: note = Description of sequence: I23RB144
  REGION 1..8: note = Description of type of peptide: HCDR1
GYTFTSYI

SEQ ID NO: 289 - protein, 8 aa, Mus musculus
  REGION 1..8: note = Description of sequence: I23RB144
  REGION 1..8: note = Description of type of peptide: HCDR2
IDPYNDDT

SEQ ID NO: 290 - protein, 16 aa, Mus musculus
  REGION 1..16: note = Description of sequence: I23RB144
  REGION 1..16: note = Description of type of peptide: HCDR3
ARLGSINYYDGSYFDY

SEQ ID NO: 291 - protein, 11 aa, Mus musculus
  REGION 1..11: note = Description of sequence: I23RB144
  REGION 1..11: note = Description of type of peptide: LCDR1
QSLLDSDGKTY

SEQ ID NO: 292 - skipped

SEQ ID NO: 293 - protein, 9 aa, Mus musculus
  REGION 1..9: note = Description of sequence: I23RB144
  REGION 1..9: note = Description of type of peptide: LCDR3
WQGIHFPLT

SEQ ID NO: 294 - protein, 9 aa, Mus musculus
  REGION 1..9: note = Description of sequence: I23RB148
  REGION 1..9: note = Description of type of peptide: HCDR1
GYSITSGYN

SEQ ID NO: 295 - protein, 7 aa, Mus musculus
  REGION 1..7: note = Description of sequence: I23RB148
  REGION 1..7: note = Description of type of peptide: HCDR2
IHSSGTT

SEQ ID NO: 296 - protein, 11 aa, Mus musculus
  REGION 1..11: note = Description of sequence: I23RB148
  REGION 1..11: note = Description of type of peptide: HCDR3
TRQLGLKAMEY

SEQ ID NO: 297 - protein, 6 aa, Mus musculus
  REGION 1..6: note = Description of sequence: I23RB148
  REGION 1..6: note = Description of type of peptide: LCDR1
QEVRTA

SEQ ID NO: 298 - skipped

SEQ ID NO: 299 - protein, 9 aa, Mus musculus
  REGION 1..9: note = Description of sequence: I23RB148
  REGION 1..9: note = Description of type of peptide: LCDR3
QQHYTTPYS

SEQ ID NO: 300 - protein, 9 aa, Mus musculus
  REGION 1..9: note = Description of sequence: I23RB149
  REGION 1..9: note = Description of type of peptide: HCDR1
GYSITSGYN

SEQ ID NO: 301 - protein, 7 aa, Mus musculus
  REGION 1..7: note = Description of sequence: I23RB149
  REGION 1..7: note = Description of type of peptide: HCDR2
IHFSDRT

SEQ ID NO: 302 - protein, 11 aa, Mus musculus
  REGION 1..11: note = Description of sequence: I23RB149
  REGION 1..11: note = Description of type of peptide: HCDR3
SRQLGLKALDY

SEQ ID NO: 303 - protein, 11 aa, Mus musculus
  REGION 1..11: note = Description of sequence: I23RB149
  REGION 1..11: note = Description of type of peptide: LCDR1
QSLVHSNGNTY

SEQ ID NO: 304 - skipped

SEQ ID NO: 305 - protein, 9 aa, Mus musculus
  REGION 1..9: note = Description of sequence: I23RB149
  REGION 1..9: note = Description of type of peptide: LCDR3
SQSTHVPLT

SEQ ID NO: 306 - protein, 8 aa, Mus musculus
  REGION 1..8: note = Description of sequence: I23RB150
  REGION 1..8: note = Description of type of peptide: HCDR1
AYTFTNYG

SEQ ID NO: 307 - protein, 8 aa, Mus musculus
  REGION 1..8: note = Description of sequence: I23RB150
  REGION 1..8: note = Description of type of peptide: HCDR2
IKTNTGEP

SEQ ID NO: 308 - protein, 14 aa, Mus musculus
  REGION 1..14: note = Description of sequence: I23RB150
  REGION 1..14: note = Description of type of peptide: HCDR3
ARSRQLGLRYYFDY

SEQ ID NO: 309 - protein, 6 aa, Mus musculus
  REGION 1..6: note = Description of sequence: I23RB150
  REGION 1..6: note = Description of type of peptide: LCDR1
QDVSTA

SEQ ID NO: 310 - skipped

SEQ ID NO: 311 - protein, 9 aa, Mus musculus
  REGION 1..9: note = Description of sequence: I23RB150
  REGION 1..9: note = Description of type of peptide: LCDR3
QQHYSTPYT

SEQ ID NO: 312 - protein, 8 aa, Mus musculus
  REGION 1..8: note = Description of sequence: I23RB153
  REGION 1..8: note = Description of type of peptide: HCDR1
GFTFSSDT

SEQ ID NO: 313 - protein, 8 aa, Mus musculus
  REGION 1..8: note = Description of sequence: I23RB153
  REGION 1..8: note = Description of type of peptide: HCDR2
ISSNGGST

SEQ ID NO: 314 - protein, 10 aa, Mus musculus
  REGION 1..10: note = Description of sequence: I23RB153
  REGION 1..10: note = Description of type of peptide: HCDR3
ASPGYPWFAY

SEQ ID NO: 315 - protein, 6 aa, Mus musculus
  REGION 1..6: note = Description of sequence: I23RB153
  REGION 1..6: note = Description of type of peptide: LCDR1
QDVGNA

SEQ ID NO: 316 - skipped

SEQ ID NO: 317 - protein, 9 aa, Mus musculus
  REGION 1..9: note = Description of sequence: I23RB153
  REGION 1..9: note = Description of type of peptide: LCDR3
QQYNRYPLT

SEQ ID NO: 318 - protein, 9 aa, Mus musculus
  REGION 1..9: note = Description of sequence: I23RB155
  REGION 1..9: note = Description of type of peptide: HCDR1
GYSITSGHS

SEQ ID NO: 319 - protein, 7 aa, Mus musculus
  REGION 1..7: note = Description of sequence: I23RB155
  REGION 1..7: note = Description of type of peptide: HCDR2
ISYDGTN

SEQ ID NO: 320 - protein, 16 aa, Mus musculus
  REGION 1..16: note = Description of sequence: I23RB155
  REGION 1..16: note = Description of type of peptide: HCDR3
ARGGGYYGGTYRVFAD

SEQ ID NO: 321 - protein, 10 aa, Mus musculus
  REGION 1..10: note = Description of sequence: I23RB155
  REGION 1..10: note = Description of type of peptide: LCDR1
ESVDTYGNSF

SEQ ID NO: 322 - skipped

SEQ ID NO: 323 - protein, 9 aa, Mus musculus
  REGION 1..9: note = Description of sequence: I23RB155
  REGION 1..9: note = Description of type of peptide: LCDR3
QQGNKDPYT

SEQ ID NO: 324 - protein, 8 aa, Mus musculus
  REGION 1..8: note = Description of sequence: I23RB156
  REGION 1..8: note = Description of type of peptide: HCDR1
GFSLTSYA

SEQ ID NO: 325 - protein, 7 aa, Mus musculus
  REGION 1..7: note = Description of sequence: I23RB156
  REGION 1..7: note = Description of type of peptide: HCDR2
IWTGGGT

SEQ ID NO: 326 - protein, 15 aa, Mus musculus
  REGION 1..15: note = Description of sequence: I23RB156
  REGION 1..15: note = Description of type of peptide: HCDR3
ARNRDYSNYRWYFDV

SEQ ID NO: 327 - protein, 6 aa, Mus musculus
  REGION 1..6: note = Description of sequence: I23RB156
  REGION 1..6: note = Description of type of peptide: LCDR1
QDVSTA

SEQ ID NO: 328 - skipped

SEQ ID NO: 329 - protein, 9 aa, Mus musculus
  REGION 1..9: note = Description of sequence: I23RB156
  REGION 1..9: note = Description of type of peptide: LCDR3
QQHYSIPLT

SEQ ID NO: 330 - protein, 8 aa, Mus musculus
  REGION 1..8: note = Description of sequence: I23RB157
  REGION 1..8: note = Description of type of peptide: HCDR1
GFTFSRYT

SEQ ID NO: 331 - protein, 8 aa, Mus musculus
  REGION 1..8: note = Description of sequence: I23RB157
  REGION 1..8: note = Description of type of peptide: HCDR2
ISTGGGDT

SEQ ID NO: 332 - protein, 15 aa, Mus musculus
  REGION 1..15: note = Description of sequence: I23RB157
  REGION 1..15: note = Description of type of peptide: HCDR3
ARRTSYSYYNYVFDY

SEQ ID NO: 333 - protein, 10 aa, Mus musculus
  REGION 1..10: note = Description of sequence: I23RB157
  REGION 1..10: note = Description of type of peptide: LCDR1
ESVDNYGISF

SEQ ID NO: 334 - skipped

SEQ ID NO: 335 - protein, 9 aa, Mus musculus
  REGION 1..9: note = Description of sequence: I23RB157
  REGION 1..9: note = Description of type of peptide: LCDR3
QQSKEVPWT

SEQ ID NO: 336 - protein, 8 aa, Mus musculus
  REGION 1..8: note = Description of sequence: I23RB159
  REGION 1..8: note = Description of type of peptide: HCDR1
GFTFSDYG

SEQ ID NO: 337 - protein, 8 aa, Mus musculus
  REGION 1..8: note = Description of sequence: I23RB159
  REGION 1..8: note = Description of type of peptide: HCDR2
ISNLAYSV

SEQ ID NO: 338 - protein, 13 aa, Mus musculus
  REGION 1..13: note = Description of sequence: I23RB159
  REGION 1..13: note = Description of type of peptide: HCDR3
ARHGDYRNYGFAY

SEQ ID NO: 339 - protein, 6 aa, Mus musculus
  REGION 1..6: note = Description of sequence: I23RB159
  REGION 1..6: note = Description of type of peptide: LCDR1
QDISNY

SEQ ID NO: 340 - skipped

SEQ ID NO: 341 - protein, 9 aa, Mus musculus
  REGION 1..9: note = Description of sequence: I23RB159
  REGION 1..9: note = Description of type of peptide: LCDR3
QQGNTLPWT

SEQ ID NO: 342 - protein, 9 aa, Mus musculus
  REGION 1..9: note = Description of sequence: I23RB160
  REGION 1..9: note = Description of type of peptide: HCDR1
GYSITSGYN

SEQ ID NO: 343 - protein, 7 aa, Mus musculus
  REGION 1..7: note = Description of sequence: I23RB160
  REGION 1..7: note = Description of type of peptide: HCDR2
IHYSSGT

SEQ ID NO: 344 - protein, 11 aa, Mus musculus
  REGION 1..11: note = Description of sequence: I23RB160
  REGION 1..11: note = Description of type of peptide: HCDR3
ARQLGLKAMDY

SEQ ID NO: 345 - protein, 6 aa, Mus musculus
  REGION 1..6: note = Description of sequence: I23RB160
  REGION 1..6: note = Description of type of peptide: LCDR1
QDVRTA

SEQ ID NO: 346 - skipped

SEQ ID NO: 347 - protein, 9 aa, Mus musculus
  REGION 1..9: note = Description of sequence: I23RB160
  REGION 1..9: note = Description of type of peptide: LCDR3
QQHYTTPYT

SEQ ID NO: 348 - protein, 8 aa, Mus musculus
  REGION 1..8: note = Description of sequence: I23RB161
  REGION 1..8: note = Description of type of peptide: HCDR1
VYAFSSSW

SEQ ID NO: 349 - protein, 8 aa, Mus musculus
  REGION 1..8: note = Description of sequence: I23RB161
  REGION 1..8: note = Description of type of peptide: HCDR2
IYPGDGDT

SEQ ID NO: 350 - protein, 12 aa, Mus musculus
  REGION 1..12: note = Description of sequence: I23RB161
  REGION 1..12: note = Description of type of peptide: HCDR3
ARRYDFGSAMDY

SEQ ID NO: 351 - protein, 5 aa, Mus musculus
  REGION 1..5: note = Description of sequence: I23RB161
  REGION 1..5: note = Description of type of peptide: LCDR1
SSVSY

SEQ ID NO: 352 - skipped

SEQ ID NO: 353 - protein, 9 aa, Mus musculus
  REGION 1..9: note = Description of sequence: I23RB161
  REGION 1..9: note = Description of type of peptide: LCDR3
QQWSSNPPT

SEQ ID NO: 354 - protein, 8 aa, Mus musculus
  REGION 1..8: note = Description of sequence: I23RB162
  REGION 1..8: note = Description of type of peptide: HCDR1
GYTFTNYV

SEQ ID NO: 355 - protein, 8 aa, Mus musculus
  REGION 1..8: note = Description of sequence: I23RB162
  REGION 1..8: note = Description of type of peptide: HCDR2
INPYNDGT

SEQ ID NO: 356 - protein, 13 aa, Mus musculus
  REGION 1..13: note = Description of sequence: I23RB162
  REGION 1..13: note = Description of type of peptide: HCDR3
ARSRTGTRWYFDV

SEQ ID NO: 357 - protein, 6 aa, Mus musculus
  REGION 1..6: note = Description of sequence: I23RB162
  REGION 1..6: note = Description of type of peptide: LCDR1
QNVGTN

SEQ ID NO: 358 - skipped

SEQ ID NO: 359 - protein, 9 aa, Mus musculus
  REGION 1..9: note = Description of sequence: I23RB162
  REGION 1..9: note = Description of type of peptide: LCDR3
QQYNSYPFT

SEQ ID NO: 360 - protein, 8 aa, Mus musculus
  REGION 1..8: note = Description of sequence: I23RB165
  REGION 1..8: note = Description of type of peptide: HCDR1
GFNIKDSL

SEQ ID NO: 361 - protein, 8 aa, Mus musculus
  REGION 1..8: note = Description of sequence: I23RB165
  REGION 1..8: note = Description of type of peptide: HCDR2
IDPEDGKT

SEQ ID NO: 362 - protein, 11 aa, Mus musculus
  REGION 1..11: note = Description of sequence: I23RB165
  REGION 1..11: note = Description of type of peptide: HCDR3
ARREVLDYFDY

SEQ ID NO: 363 - protein, 10 aa, Mus musculus
  REGION 1..10: note = Description of sequence: I23RB165
  REGION 1..10: note = Description of type of peptide: LCDR1
KSVSTSGYSY

SEQ ID NO: 364 - skipped

SEQ ID NO: 365 - protein, 9 aa, Mus musculus
  REGION 1..9: note = Description of sequence: I23RB165
  REGION 1..9: note = Description of type of peptide: LCDR3
QHSRELPLT

SEQ ID NO: 366 - protein, 10 aa, Mus musculus
  REGION 1..10: note = Description of sequence: I23RB166
  REGION 1..10: note = Description of type of peptide: HCDR1
GYSITNGNHW

SEQ ID NO: 367 - protein, 7 aa, Mus musculus
  REGION 1..7: note = Description of sequence: I23RB166
  REGION 1..7: note = Description of type of peptide: HCDR2
IRSSGST

SEQ ID NO: 368 - protein, 14 aa, Mus musculus
  REGION 1..14: note = Description of sequence: I23RB166
  REGION 1..14: note = Description of type of peptide: HCDR3
ARERLRLRWSYFDY

SEQ ID NO: 369 - protein, 6 aa, Mus musculus
  REGION 1..6: note = Description of sequence: I23RB166
  REGION 1..6: note = Description of type of peptide: LCDR1
QDVSTA

SEQ ID NO: 370 - skipped

SEQ ID NO: 371 - protein, 9 aa, Mus musculus
  REGION 1..9: note = Description of sequence: I23RB166
  REGION 1..9: note = Description of type of peptide: LCDR3
QQHYSTPRT

SEQ ID NO: 372 - protein, 8 aa, Mus musculus
  REGION 1..8: note = Description of sequence: I23RB168
  REGION 1..8: note = Description of type of peptide: HCDR1
GYTFTDYY

SEQ ID NO: 373 - protein, 8 aa, Mus musculus
  REGION 1..8: note = Description of sequence: I23RB168
  REGION 1..8: note = Description of type of peptide: HCDR2
IYPAINNT

SEQ ID NO: 374 - protein, 10 aa, Mus musculus
  REGION 1..10: note = Description of sequence: I23RB168
  REGION 1..10: note = Description of type of peptide: HCDR3
AISRKPYFDY

SEQ ID NO: 375 - protein, 6 aa, Mus musculus
  REGION 1..6: note = Description of sequence: I23RB168
  REGION 1..6: note = Description of type of peptide: LCDR1
EDLYNR

SEQ ID NO: 376 - skipped

SEQ ID NO: 377 - protein, 9 aa, Mus musculus
  REGION 1..9: note = Description of sequence: I23RB168
  REGION 1..9: note = Description of type of peptide: LCDR3
QQYWSIPWT

SEQ ID NO: 378 - protein, 8 aa, Mus musculus
  REGION 1..8: note = Description of sequence: I23RB169
  REGION 1..8: note = Description of type of peptide: HCDR1
GYTFTTVG

SEQ ID NO: 379 - protein, 8 aa, Mus musculus
  REGION 1..8: note = Description of sequence: I23RB169
  REGION 1..8: note = Description of type of peptide: HCDR2
INTHSGEP

SEQ ID NO: 380 - protein, 12 aa, Mus musculus
  REGION 1..12: note = Description of sequence: I23RB169
  REGION 1..12: note = Description of type of peptide: HCDR3
ARSSALTGAFAY

SEQ ID NO: 381 - protein, 10 aa, Mus musculus
  REGION 1..10: note = Description of sequence: I23RB169
  REGION 1..10: note = Description of type of peptide: LCDR1
KSVSTSDYSY

SEQ ID NO: 382 - skipped

SEQ ID NO: 383 - protein, 9 aa, Mus musculus
  REGION 1..9: note = Description of sequence: I23RB169
  REGION 1..9: note = Description of type of peptide: LCDR3
QHSRELPRT

SEQ ID NO: 384 - protein, 9 aa, Mus musculus
  REGION 1..9: note = Description of sequence: I23RB173
  REGION 1..9: note = Description of type of peptide: HCDR1
GYSITSGYY

SEQ ID NO: 385 - protein, 7 aa, Mus musculus
  REGION 1..7: note = Description of sequence: I23RB173
  REGION 1..7: note = Description of type of peptide: HCDR2
ISYDGGN

SEQ ID NO: 386 - protein, 14 aa, Mus musculus
  REGION 1..14: note = Description of sequence: I23RB173
  REGION 1..14: note = Description of type of peptide: HCDR3
ARDAGLLPYYAMDY

SEQ ID NO: 387 - protein, 5 aa, Mus musculus
  REGION 1..5: note = Description of sequence: I23RB173
  REGION 1..5: note = Description of type of peptide: LCDR1
SSVSY

SEQ ID NO: 388 - skipped

SEQ ID NO: 389 - protein, 9 aa, Mus musculus
  REGION 1..9: note = Description of sequence: I23RB173
  REGION 1..9: note = Description of type of peptide: LCDR3
QQRSSYPLT

SEQ ID NO: 390 - protein, 8 aa, Mus musculus
  REGION 1..8: note = Description of sequence: I23RB177
  REGION 1..8: note = Description of type of peptide: HCDR1
GYTITDYT

SEQ ID NO: 391 - protein, 8 aa, Mus musculus
  REGION 1..8: note = Description of sequence: I23RB177
  REGION 1..8: note = Description of type of peptide: HCDR2
INPNYGGT

SEQ ID NO: 392 - protein, 9 aa, Mus musculus
  REGION 1..9: note = Description of sequence: I23RB177
  REGION 1..9: note = Description of type of peptide: HCDR3
VRGNIYFDY

SEQ ID NO: 393 - protein, 6 aa, Mus musculus
  REGION 1..6: note = Description of sequence: I23RB177
  REGION 1..6: note = Description of type of peptide: LCDR1
QDINSY

SEQ ID NO: 394 - skipped

SEQ ID NO: 395 - protein, 9 aa, Mus musculus
  REGION 1..9: note = Description of sequence: I23RB177
  REGION 1..9: note = Description of type of peptide: LCDR3
QQYDEFPRT

SEQ ID NO: 396 - protein, 10 aa, Mus musculus
  REGION 1..10: note = Description of sequence: I23RB180
  REGION 1..10: note = Description of type of peptide: HCDR1
GFSLSTYGMG

SEQ ID NO: 397 - protein, 7 aa, Mus musculus
  REGION 1..7: note = Description of sequence: I23RB180
  REGION 1..7: note = Description of type of peptide: HCDR2
IWWNDSK

SEQ ID NO: 398 - protein, 12 aa, Mus musculus
  REGION 1..12: note = Description of sequence: I23RB180
  REGION 1..12: note = Description of type of peptide: HCDR3
GRIDGYYECVDV

SEQ ID NO: 399 - protein, 6 aa, Mus musculus
  REGION 1..6: note = Description of sequence: I23RB180
  REGION 1..6: note = Description of type of peptide: LCDR1
VNIHNY

SEQ ID NO: 400 - skipped

SEQ ID NO: 401 - protein, 11 aa, Mus musculus
  REGION 1..11: note = Description of sequence: I23RB180
  REGION 1..11: note = Description of type of peptide: LCDR3
QHFWTTPYMYT

SEQ ID NO: 402 - protein, 9 aa, Mus musculus
  REGION 1..9: note = Description of sequence: I23RB182
  REGION 1..9: note = Description of type of peptide: HCDR1
GYSITSGYF

SEQ ID NO: 403 - protein, 7 aa, Mus musculus
  REGION 1..7: note = Description of sequence: I23RB182
  REGION 1..7: note = Description of type of peptide: HCDR2
IDNDGSN

SEQ ID NO: 404 - protein, 10 aa, Mus musculus
  REGION 1..10: note = Description of sequence: I23RB182
  REGION 1..10: note = Description of type of peptide: HCDR3
ARGRLGFFDS

SEQ ID NO: 405 - protein, 5 aa, Mus musculus
  REGION 1..5: note = Description of sequence: I23RB182
  REGION 1..5: note = Description of type of peptide: LCDR1
SSVNY

SEQ ID NO: 406 - skipped

SEQ ID NO: 407 - protein, 9 aa, Mus musculus
  REGION 1..9: note = Description of sequence: I23RB182
  REGION 1..9: note = Description of type of peptide: LCDR3
QQFTNSPWT

SEQ ID NO: 408 - protein, 8 aa, Mus musculus
  REGION 1..8: note = Description of sequence: I23RB188
  REGION 1..8: note = Description of type of peptide: HCDR1
GYTFTNYG

SEQ ID NO: 409 - protein, 8 aa, Mus musculus
  REGION 1..8: note = Description of sequence: I23RB188
  REGION 1..8: note = Description of type of peptide: HCDR2
INTYTGAP

SEQ ID NO: 410 - protein, 14 aa, Mus musculus
  REGION 1..14: note = Description of sequence: I23RB188
  REGION 1..14: note = Description of type of peptide: HCDR3
ARGNGYPYYYGINY

SEQ ID NO: 411 - protein, 6 aa, Mus musculus
  REGION 1..6: note = Description of sequence: I23RB188
  REGION 1..6: note = Description of type of peptide: LCDR1
QEISGN

SEQ ID NO: 412 - skipped

SEQ ID NO: 413 - protein, 9 aa, Mus musculus
  REGION 1..9: note = Description of sequence: I23RB188
  REGION 1..9: note = Description of type of peptide: LCDR3
LQYASYPWT

SEQ ID NO: 414 - protein, 9 aa, Mus musculus
  REGION 1..9: note = Description of sequence: I23RB189
  REGION 1..9: note = Description of type of peptide: HCDR1
GYSITSGYN

SEQ ID NO: 415 - protein, 7 aa, Mus musculus
  REGION 1..7: note = Description of sequence: I23RB189
  REGION 1..7: note = Description of type of peptide: HCDR2
IHSSGTT

SEQ ID NO: 416 - protein, 11 aa, Mus musculus
  REGION 1..11: note = Description of sequence: I23RB189
  REGION 1..11: note = Description of type of peptide: HCDR3
TRQLGLKAMEY

SEQ ID NO: 417 - protein, 6 aa, Mus musculus
  REGION 1..6: note = Description of sequence: I23RB189
  REGION 1..6: note = Description of type of peptide: LCDR1
ENVGTY

SEQ ID NO: 418 - skipped

SEQ ID NO: 419 - protein, 9 aa, Mus musculus
  REGION 1..9: note = Description of sequence: I23RB189
  REGION 1..9: note = Description of type of peptide: LCDR3
GQSYSYPPT

SEQ ID NO: 420 - protein, 8 aa, Mus musculus
  REGION 1..8: note = Description of sequence: I23RB27
  REGION 1..8: note = Description of type of peptide: HCDR1
GFSLTSYG

SEQ ID NO: 421 - protein, 7 aa, Mus musculus
  REGION 1..7: note = Description of sequence: I23RB27
  REGION 1..7: note = Description of type of peptide: HCDR2
LGWDDKK

SEQ ID NO: 422 - protein, 11 aa, Mus musculus
  REGION 1..11: note = Description of sequence: I23RB27
  REGION 1..11: note = Description of type of peptide: HCDR3
TKEDVSYAMDF

SEQ ID NO: 423 - protein, 10 aa, Mus musculus
  REGION 1..10: note = Description of sequence: I23RB27
  REGION 1..10: note = Description of type of peptide: LCDR1
ESVEYYGTSL

SEQ ID NO: 424 - skipped

SEQ ID NO: 425 - protein, 9 aa, Mus musculus
  REGION 1..9: note = Description of sequence: I23RB27
  REGION 1..9: note = Description of type of peptide: LCDR3
QQGKKVPWT

SEQ ID NO: 426 - protein, 10 aa, Mus musculus
  REGION 1..10: note = Description of sequence: I23RB30
  REGION 1..10: note = Description of type of peptide: HCDR1
GFSLSTSGMG

SEQ ID NO: 427 - protein, 7 aa, Mus musculus
  REGION 1..7: note = Description of sequence: I23RB30
  REGION 1..7: note = Description of type of peptide: HCDR2
IYWDDDK

SEQ ID NO: 428 - protein, 12 aa, Mus musculus
  REGION 1..12: note = Description of sequence: I23RB30
  REGION 1..12: note = Description of type of peptide: HCDR3
ARRTLGGPPFDY

SEQ ID NO: 429 - protein, 6 aa, Mus musculus
  REGION 1..6: note = Description of sequence: I23RB30
  REGION 1..6: note = Description of type of peptide: LCDR1
QNIRTA

SEQ ID NO: 430 - skipped

SEQ ID NO: 431 - protein, 9 aa, Mus musculus
  REGION 1..9: note = Description of sequence: I23RB30
  REGION 1..9: note = Description of type of peptide: LCDR3
LQHWNYPLT

SEQ ID NO: 432 - protein, 8 aa, Mus musculus
  REGION 1..8: note = Description of sequence: I23RB31
  REGION 1..8: note = Description of type of peptide: HCDR1
GYTFTGYW

SEQ ID NO: 433 - protein, 8 aa, Mus musculus
  REGION 1..8: note = Description of sequence: I23RB31
  REGION 1..8: note = Description of type of peptide: HCDR2
IDPSDTET

SEQ ID NO: 434 - protein, 13 aa, Mus musculus
  REGION 1..13: note = Description of sequence: I23RB31
  REGION 1..13: note = Description of type of peptide: HCDR3
ARWGLGRNFAMDY

SEQ ID NO: 435 - protein, 6 aa, Mus musculus
  REGION 1..6: note = Description of sequence: I23RB31
  REGION 1..6: note = Description of type of peptide: LCDR1
QSISDH

SEQ ID NO: 436 - skipped

SEQ ID NO: 437 - protein, 9 aa, Mus musculus
  REGION 1..9: note = Description of sequence: I23RB31
  REGION 1..9: note = Description of type of peptide: LCDR3
QNGHSFPLT

SEQ ID NO: 438 - protein, 8 aa, Mus musculus
  REGION 1..8: note = Description of sequence: I23RB32
  REGION 1..8: note = Description of type of peptide: HCDR1
GYTFTDYA

SEQ ID NO: 439 - protein, 8 aa, Mus musculus
  REGION 1..8: note = Description of sequence: I23RB32
  REGION 1..8: note = Description of type of peptide: HCDR2
IYPGGGNT

SEQ ID NO: 440 - protein, 13 aa, Mus musculus
  REGION 1..13: note = Description of sequence: I23RB32
  REGION 1..13: note = Description of type of peptide: HCDR3
ARGRLRRDYPMDY

SEQ ID NO: 441 - protein, 12 aa, Mus musculus
  REGION 1..12: note = Description of sequence: I23RB32
  REGION 1..12: note = Description of type of peptide: LCDR1
QSLLNSGNQKNY

SEQ ID NO: 442 - skipped

SEQ ID NO: 443 - protein, 9 aa, Mus musculus
  REGION 1..9: note = Description of sequence: I23RB32
  REGION 1..9: note = Description of type of peptide: LCDR3
QNDYTYPLT

SEQ ID NO: 444 - protein, 8 aa, Mus musculus
  REGION 1..8: note = Description of sequence: I23RB33
  REGION 1..8: note = Description of type of peptide: HCDR1
GFNIRDIY

SEQ ID NO: 445 - protein, 8 aa, Mus musculus
  REGION 1..8: note = Description of sequence: I23RB33
  REGION 1..8: note = Description of type of peptide: HCDR2
IDPANGHS

SEQ ID NO: 446 - protein, 14 aa, Mus musculus
  REGION 1..14: note = Description of sequence: I23RB33
  REGION 1..14: note = Description of type of peptide: HCDR3
ARGSDNDYGRVLAY

SEQ ID NO: 447 - protein, 7 aa, Mus musculus
  REGION 1..7: note = Description of sequence: I23RB33
  REGION 1..7: note = Description of type of peptide: LCDR1
SSVRSSY

SEQ ID NO: 448 - skipped

SEQ ID NO: 449 - protein, 10 aa, Mus musculus
  REGION 1..10: note = Description of sequence: I23RB33
  REGION 1..10: note = Description of type of peptide: LCDR3
QQYTGNPIFT

SEQ ID NO: 450 - protein, 9 aa, Mus musculus
  REGION 1..9: note = Description of sequence: I23RB35
  REGION 1..9: note = Description of type of peptide: HCDR1
GYSITSGHN

SEQ ID NO: 451 - protein, 7 aa, Mus musculus
  REGION 1..7: note = Description of sequence: I23RB35
  REGION 1..7: note = Description of type of peptide: HCDR2
ISYDGSN

SEQ ID NO: 452 - protein, 16 aa, Mus musculus
  REGION 1..16: note = Description of sequence: I23RB35
  REGION 1..16: note = Description of type of peptide: HCDR3
ARGGGYFGNSYRVFAS

SEQ ID NO: 453 - protein, 10 aa, Mus musculus
  REGION 1..10: note = Description of sequence: I23RB35
  REGION 1..10: note = Description of type of peptide: LCDR1
ESVDSYGNSF

SEQ ID NO: 454 - skipped

SEQ ID NO: 455 - protein, 9 aa, Mus musculus
  REGION 1..9: note = Description of sequence: I23RB35
  REGION 1..9: note = Description of type of peptide: LCDR3
QQSNADPYT

SEQ ID NO: 456 - protein, 8 aa, Mus musculus
  REGION 1..8: note = Description of sequence: I23RB36
  REGION 1..8: note = Description of type of peptide: HCDR1
GFNIKDTY

SEQ ID NO: 457 - protein, 8 aa, Mus musculus
  REGION 1..8: note = Description of sequence: I23RB36
  REGION 1..8: note = Description of type of peptide: HCDR2
IDPANGNT

SEQ ID NO: 458 - protein, 9 aa, Mus musculus
  REGION 1..9: note = Description of sequence: I23RB36
  REGION 1..9: note = Description of type of peptide: HCDR3
TRGTSWFAY

SEQ ID NO: 459 - protein, 6 aa, Mus musculus
  REGION 1..6: note = Description of sequence: I23RB36
  REGION 1..6: note = Description of type of peptide: LCDR1
ENVGTS

SEQ ID NO: 460 - skipped

SEQ ID NO: 461 - protein, 9 aa, Mus musculus
  REGION 1..9: note = Description of sequence: I23RB36
  REGION 1..9: note = Description of type of peptide: LCDR3
GQSYSYPRT

SEQ ID NO: 462 - protein, 8 aa, Mus musculus
  REGION 1..8: note = Description of sequence: I23RB39
  REGION 1..8: note = Description of type of peptide: HCDR1
GYTFTNYY

SEQ ID NO: 463 - protein, 8 aa, Mus musculus
  REGION 1..8: note = Description of sequence: I23RB39
  REGION 1..8: note = Description of type of peptide: HCDR2
IYPGNGGT

SEQ ID NO: 464 - protein, 13 aa, Mus musculus
  REGION 1..13: note = Description of sequence: I23RB39
  REGION 1..13: note = Description of type of peptide: HCDR3
ARSRGGSRNYFDY

SEQ ID NO: 465 - protein, 6 aa, Mus musculus
  REGION 1..6: note = Description of sequence: I23RB39
  REGION 1..6: note = Description of type of peptide: LCDR1
QDVSTA

SEQ ID NO: 466 - skipped

SEQ ID NO: 467 - protein, 9 aa, Mus musculus
  REGION 1..9: note = Description of sequence: I23RB39
  REGION 1..9: note = Description of type of peptide: LCDR3
QQHYSSPRT

SEQ ID NO: 468 - protein, 8 aa, Mus musculus
  REGION 1..8: note = Description of sequence: I23RB42
  REGION 1..8: note = Description of type of peptide: HCDR1
GYSFTDYI

SEQ ID NO: 469 - protein, 8 aa, Mus musculus
  REGION 1..8: note = Description of sequence: I23RB42
  REGION 1..8: note = Description of type of peptide: HCDR2
INPYFGFT

SEQ ID NO: 470 - protein, 14 aa, Mus musculus
  REGION 1..14: note = Description of sequence: I23RB42
  REGION 1..14: note = Description of type of peptide: HCDR3
SRGSYYGYETFFDY

SEQ ID NO: 471 - protein, 11 aa, Mus musculus
  REGION 1..11: note = Description of sequence: I23RB42
  REGION 1..11: note = Description of type of peptide: LCDR1
KSLLHSNGNTY

SEQ ID NO: 472 - skipped

SEQ ID NO: 473 - protein, 9 aa, Mus musculus
  REGION 1..9: note = Description of sequence: I23RB42
  REGION 1..9: note = Description of type of peptide: LCDR3
MQHLEYPYT

SEQ ID NO: 474 - protein, 10 aa, Mus musculus
  REGION 1..10: note = Description of sequence: I23RB45
  REGION 1..10: note = Description of type of peptide: HCDR1
GFSLSTYGMG

SEQ ID NO: 475 - protein, 7 aa, Mus musculus
  REGION 1..7: note = Description of sequence: I23RB45
  REGION 1..7: note = Description of type of peptide: HCDR2
IYWDDDK

SEQ ID NO: 476 - protein, 16 aa, Mus musculus
  REGION 1..16: note = Description of sequence: I23RB45
  REGION 1..16: note = Description of type of peptide: HCDR3
AQRALPLLGQKAPFDY

SEQ ID NO: 477 - protein, 6 aa, Mus musculus
  REGION 1..6: note = Description of sequence: I23RB45
  REGION 1..6: note = Description of type of peptide: LCDR1
QNVRTA

SEQ ID NO: 478 - skipped

SEQ ID NO: 479 - protein, 9 aa, Mus musculus
  REGION 1..9: note = Description of sequence: I23RB45
  REGION 1..9: note = Description of type of peptide: LCDR3
LQHWNYPLT

SEQ ID NO: 480 - protein, 8 aa, Mus musculus
  REGION 1..8: note = Description of sequence: I23RB47
  REGION 1..8: note = Description of type of peptide: HCDR1
GFSLTNYD

SEQ ID NO: 481 - protein, 7 aa, Mus musculus
  REGION 1..7: note = Description of sequence: I23RB47
  REGION 1..7: note = Description of type of peptide: HCDR2
IWSDGRT

SEQ ID NO: 482 - protein, 15 aa, Mus musculus
  REGION 1..15: note = Description of sequence: I23RB47
  REGION 1..15: note = Description of type of peptide: HCDR3
ARNNYYRYGRNTMDY

SEQ ID NO: 483 - protein, 6 aa, Mus musculus
  REGION 1..6: note = Description of sequence: I23RB47
  REGION 1..6: note = Description of type of peptide: LCDR1
QTIGSW

SEQ ID NO: 484 - skipped

SEQ ID NO: 485 - protein, 9 aa, Mus musculus
  REGION 1..9: note = Description of sequence: I23RB47
  REGION 1..9: note = Description of type of peptide: LCDR3
HQLYSIPLT

SEQ ID NO: 486 - protein, 9 aa, Mus musculus
  REGION 1..9: note = Description of sequence: I23RB51
  REGION 1..9: note = Description of type of peptide: HCDR1
GYSITSGYN

SEQ ID NO: 487 - protein, 7 aa, Mus musculus
  REGION 1..7: note = Description of sequence: I23RB51
  REGION 1..7: note = Description of type of peptide: HCDR2
VHYRDST

SEQ ID NO: 488 - protein, 11 aa, Mus musculus
  REGION 1..11: note = Description of sequence: I23RB51
  REGION 1..11: note = Description of type of peptide: HCDR3
ARQLGLKAMDY

SEQ ID NO: 489 - protein, 6 aa, Mus musculus
  REGION 1..6: note = Description of sequence: I23RB51
  REGION 1..6: note = Description of type of peptide: LCDR1
GNIHNY

SEQ ID NO: 490 - skipped

SEQ ID NO: 491 - protein, 8 aa, Mus musculus
  REGION 1..8: note = Description of sequence: I23RB51
  REGION 1..8: note = Description of type of peptide: LCDR3
QYFWTTRT

SEQ ID NO: 492 - protein, 8 aa, Mus musculus
  REGION 1..8: note = Description of sequence: I23RB54
  REGION 1..8: note = Description of type of peptide: HCDR1
GFTFSSYA

SEQ ID NO: 493 - protein, 8 aa, Mus musculus
  REGION 1..8: note = Description of sequence: I23RB54
  REGION 1..8: note = Description of type of peptide: HCDR2
ISSGGSYI

SEQ ID NO: 494 - protein, 12 aa, Mus musculus
  REGION 1..12: note = Description of sequence: I23RB54
  REGION 1..12: note = Description of type of peptide: HCDR3
ARKKSDYGAMDY

SEQ ID NO: 495 - protein, 6 aa, Mus musculus
  REGION 1..6: note = Description of sequence: I23RB54
  REGION 1..6: note = Description of type of peptide: LCDR1
QSVSND

SEQ ID NO: 496 - skipped

SEQ ID NO: 497 - protein, 9 aa, Mus musculus
  REGION 1..9: note = Description of sequence: I23RB54
  REGION 1..9: note = Description of type of peptide: LCDR3
QQDYSSLPT

SEQ ID NO: 498 - protein, 8 aa, Mus musculus
  REGION 1..8: note = Description of sequence: I23RB56
  REGION 1..8: note = Description of type of peptide: HCDR1
GFTFSSYA

SEQ ID NO: 499 - protein, 8 aa, Mus musculus
  REGION 1..8: note = Description of sequence: I23RB56
  REGION 1..8: note = Description of type of peptide: HCDR2
INSNDGST

SEQ ID NO: 500 - protein, 15 aa, Mus musculus
  REGION 1..15: note = Description of sequence: I23RB56
  REGION 1..15: note = Description of type of peptide: HCDR3
ARHFLYFSNFYYFDY

SEQ ID NO: 501 - protein, 6 aa, Mus musculus
  REGION 1..6: note = Description of sequence: I23RB56
  REGION 1..6: note = Description of type of peptide: LCDR1
QSVSND

SEQ ID NO: 502 - skipped

SEQ ID NO: 503 - protein, 9 aa, Mus musculus
  REGION 1..9: note = Description of sequence: I23RB56
  REGION 1..9: note = Description of type of peptide: LCDR3
QQDYSSPFT

SEQ ID NO: 504 - protein, 8 aa, Mus musculus
  REGION 1..8: note = Description of sequence: I23RB57
  REGION 1..8: note = Description of type of peptide: HCDR1
GYTFTNYY

SEQ ID NO: 505 - protein, 8 aa, Mus musculus
  REGION 1..8: note = Description of sequence: I23RB57
  REGION 1..8: note = Description of type of peptide: HCDR2
IYPNSGDT

SEQ ID NO: 506 - protein, 12 aa, Mus musculus
  REGION 1..12: note = Description of sequence: I23RB57
  REGION 1..12: note = Description of type of peptide: HCDR3
ARFGGFYDAMDY

SEQ ID NO: 507 - protein, 7 aa, Mus musculus
  REGION 1..7: note = Description of sequence: I23RB57
  REGION 1..7: note = Description of type of peptide: LCDR1
SSVSSSY

SEQ ID NO: 508 - skipped

SEQ ID NO: 509 - protein, 9 aa, Mus musculus
  REGION 1..9: note = Description of sequence: I23RB57
  REGION 1..9: note = Description of type of peptide: LCDR3
HQYHRSPFT

SEQ ID NO: 510 - protein, 8 aa, Mus musculus
  REGION 1..8: note = Description of sequence: I23RB58
  REGION 1..8: note = Description of type of peptide: HCDR1
GFSFIIYT

SEQ ID NO: 511 - protein, 8 aa, Mus musculus
  REGION 1..8: note = Description of sequence: I23RB58
  REGION 1..8: note = Description of type of peptide: HCDR2
ITSGGGIT

SEQ ID NO: 512 - protein, 20 aa, Mus musculus
  REGION 1..20: note = Description of sequence: I23RB58
  REGION 1..20: note = Description of type of peptide: HCDR3
ARHEGDYYDDYYRIGYAMDY

SEQ ID NO: 513 - protein, 10 aa, Mus musculus
  REGION 1..10: note = Description of sequence: I23RB58
  REGION 1..10: note = Description of type of peptide: LCDR1
ESVDSYGNSF

SEQ ID NO: 514 - skipped

SEQ ID NO: 515 - protein, 9 aa, Mus musculus
  REGION 1..9: note = Description of sequence: I23RB58
  REGION 1..9: note = Description of type of peptide: LCDR3
QQSNEDPLT

SEQ ID NO: 516 - protein, 8 aa, Mus musculus
  REGION 1..8: note = Description of sequence: I23RB60
  REGION 1..8: note = Description of type of peptide: HCDR1
GYTFTDYY

SEQ ID NO: 517 - protein, 8 aa, Mus musculus
  REGION 1..8: note = Description of sequence: I23RB60
  REGION 1..8: note = Description of type of peptide: HCDR2
IYPNNGGI

SEQ ID NO: 518 - protein, 10 aa, Mus musculus
  REGION 1..10: note = Description of sequence: I23RB60
  REGION 1..10: note = Description of type of peptide: HCDR3
AREKLRGRDY

SEQ ID NO: 519 - protein, 6 aa, Mus musculus
  REGION 1..6: note = Description of sequence: I23RB60
  REGION 1..6: note = Description of type of peptide: LCDR1
QDIRNN

SEQ ID NO: 520 - skipped

SEQ ID NO: 521 - protein, 9 aa, Mus musculus
  REGION 1..9: note = Description of sequence: I23RB60
  REGION 1..9: note = Description of type of peptide: LCDR3
QQGHTLPWT

SEQ ID NO: 522 - protein, 8 aa, Mus musculus
  REGION 1..8: note = Description of sequence: I23RB61
  REGION 1..8: note = Description of type of peptide: HCDR1
DYTFTSFD

SEQ ID NO: 523 - protein, 8 aa, Mus musculus
  REGION 1..8: note = Description of sequence: I23RB61
  REGION 1..8: note = Description of type of peptide: HCDR2
IFPGSGTT

SEQ ID NO: 524 - protein, 12 aa, Mus musculus
  REGION 1..12: note = Description of sequence: I23RB61
  REGION 1..12: note = Description of type of peptide: HCDR3
ARRLTGTRYFDV

SEQ ID NO: 525 - protein, 6 aa, Mus musculus
  REGION 1..6: note = Description of sequence: I23RB61
  REGION 1..6: note = Description of type of peptide: LCDR1
QDVITA

SEQ ID NO: 526 - skipped

SEQ ID NO: 527 - protein, 9 aa, Mus musculus
  REGION 1..9: note = Description of sequence: I23RB61
  REGION 1..9: note = Description of type of peptide: LCDR3
QQHYTTPPT

SEQ ID NO: 528 - protein, 8 aa, Mus musculus
  REGION 1..8: note = Description of sequence: I23RB65
  REGION 1..8: note = Description of type of peptide: HCDR1
GYTFTDHT

SEQ ID NO: 529 - protein, 8 aa, Mus musculus
  REGION 1..8: note = Description of sequence: I23RB65
  REGION 1..8: note = Description of type of peptide: HCDR2
IYPKSGNA

SEQ ID NO: 530 - protein, 12 aa, Mus musculus
  REGION 1..12: note = Description of sequence: I23RB65
  REGION 1..12: note = Description of type of peptide: HCDR3
ARWGLRRDGFTY

SEQ ID NO: 531 - protein, 10 aa, Mus musculus
  REGION 1..10: note = Description of sequence: I23RB65
  REGION 1..10: note = Description of type of peptide: LCDR1
QSVSTSSYNY

SEQ ID NO: 532 - skipped

SEQ ID NO: 533 - protein, 9 aa, Mus musculus
  REGION 1..9: note = Description of sequence: I23RB65
  REGION 1..9: note = Description of type of peptide: LCDR3
QHTWEIPYT

SEQ ID NO: 534 - protein, 10 aa, Mus musculus
  REGION 1..10: note = Description of sequence: I23RB66
  REGION 1..10: note = Description of type of peptide: HCDR1
GFSLSTSNMG

SEQ ID NO: 535 - protein, 7 aa, Mus musculus
  REGION 1..7: note = Description of sequence: I23RB66
  REGION 1..7: note = Description of type of peptide: HCDR2
IWWNSDK

SEQ ID NO: 536 - protein, 12 aa, Mus musculus
  REGION 1..12: note = Description of sequence: I23RB66
  REGION 1..12: note = Description of type of peptide: HCDR3
AQIRWLRFYFDY

SEQ ID NO: 537 - protein, 6 aa, Mus musculus
  REGION 1..6: note = Description of sequence: I23RB66
  REGION 1..6: note = Description of type of peptide: LCDR1
QDVSTA

SEQ ID NO: 538 - skipped

SEQ ID NO: 539 - protein, 9 aa, Mus musculus
  REGION 1..9: note = Description of sequence: I23RB66
  REGION 1..9: note = Description of type of peptide: LCDR3
QQHYSTPYT

SEQ ID NO: 540 - protein, 8 aa, Mus musculus
  REGION 1..8: note = Description of sequence: I23RB67
  REGION 1..8: note = Description of type of peptide: HCDR1
GYTFTSYW

SEQ ID NO: 541 - protein, 8 aa, Mus musculus
  REGION 1..8: note = Description of sequence: I23RB67
  REGION 1..8: note = Description of type of peptide: HCDR2
IYPGSSST

SEQ ID NO: 542 - protein, 13 aa, Mus musculus
  REGION 1..13: note = Description of sequence: I23RB67
  REGION 1..13: note = Description of type of peptide: HCDR3
ARSAYGNRLAMDY

SEQ ID NO: 543 - protein, 6 aa, Mus musculus
  REGION 1..6: note = Description of sequence: I23RB67
  REGION 1..6: note = Description of type of peptide: LCDR1
QDVSTA

SEQ ID NO: 544 - skipped

SEQ ID NO: 545 - protein, 9 aa, Mus musculus
  REGION 1..9: note = Description of sequence: I23RB67
  REGION 1..9: note = Description of type of peptide: LCDR3
QQHYSTPYT

SEQ ID NO: 546 - protein, 8 aa, Mus musculus
  REGION 1..8: note = Description of sequence: I23RB69
  REGION 1..8: note = Description of type of peptide: HCDR1
GYSFTGYN

SEQ ID NO: 547 - protein, 8 aa, Mus musculus
  REGION 1..8: note = Description of sequence: I23RB69
  REGION 1..8: note = Description of type of peptide: HCDR2
INPFYDKT

SEQ ID NO: 548 - protein, 11 aa, Mus musculus
  REGION 1..11: note = Description of sequence: I23RB69
  REGION 1..11: note = Description of type of peptide: HCDR3
ARQLGLKGFAY

SEQ ID NO: 549 - protein, 6 aa, Mus musculus
  REGION 1..6: note = Description of sequence: I23RB69
  REGION 1..6: note = Description of type of peptide: LCDR1
QDVSTA

SEQ ID NO: 550 - skipped

SEQ ID NO: 551 - protein, 9 aa, Mus musculus
  REGION 1..9: note = Description of sequence: I23RB69
  REGION 1..9: note = Description of type of peptide: LCDR3
QQHYSTPWT

SEQ ID NO: 552 - protein, 9 aa, Mus musculus
  REGION 1..9: note = Description of sequence: I23RB71
  REGION 1..9: note = Description of type of peptide: HCDR1
DYSITRGYN

SEQ ID NO: 553 - protein, 7 aa, Mus musculus
  REGION 1..7: note = Description of sequence: I23RB71
  REGION 1..7: note = Description of type of peptide: HCDR2
IHYSGST

SEQ ID NO: 554 - protein, 11 aa, Mus musculus
  REGION 1..11: note = Description of sequence: I23RB71
  REGION 1..11: note = Description of type of peptide: HCDR3
ARQYGLKAMDY

SEQ ID NO: 555 - protein, 6 aa, Mus musculus
  REGION 1..6: note = Description of sequence: I23RB71
  REGION 1..6: note = Description of type of peptide: LCDR1
QDVITA

SEQ ID NO: 556 - skipped

SEQ ID NO: 557 - protein, 9 aa, Mus musculus
  REGION 1..9: note = Description of sequence: I23RB71
  REGION 1..9: note = Description of type of peptide: LCDR3
QQHFGTPYT

SEQ ID NO: 558 - protein, 8 aa, Mus musculus
  REGION 1..8: note = Description of sequence: I23RB73
  REGION 1..8: note = Description of type of peptide: HCDR1
GYTFTDHA

SEQ ID NO: 559 - protein, 8 aa, Mus musculus
  REGION 1..8: note = Description of sequence: I23RB73
  REGION 1..8: note = Description of type of peptide: HCDR2
ISLGNGDI

SEQ ID NO: 560 - protein, 16 aa, Mus musculus
  REGION 1..16: note = Description of sequence: I23RB73
  REGION 1..16: note = Description of type of peptide: HCDR3
KRSRVLRWTTYWYFDV

SEQ ID NO: 561 - protein, 6 aa, Mus musculus
  REGION 1..6: note = Description of sequence: I23RB73
  REGION 1..6: note = Description of type of peptide: LCDR1
QDVSTA

SEQ ID NO: 562 - skipped

SEQ ID NO: 563 - protein, 9 aa, Mus musculus
  REGION 1..9: note = Description of sequence: I23RB73
  REGION 1..9: note = Description of type of peptide: LCDR3
QQYYNTPLT

SEQ ID NO: 564 - protein, 9 aa, Mus musculus
  REGION 1..9: note = Description of sequence: I23RB74
  REGION 1..9: note = Description of type of peptide: HCDR1
GYSITSGYY

SEQ ID NO: 565 - protein, 7 aa, Mus musculus
  REGION 1..7: note = Description of sequence: I23RB74
  REGION 1..7: note = Description of type of peptide: HCDR2
ISYDGSF

SEQ ID NO: 566 - protein, 15 aa, Mus musculus
  REGION 1..15: note = Description of sequence: I23RB74
  REGION 1..15: note = Description of type of peptide: HCDR3
ARAEIYYDYDGDFDY

SEQ ID NO: 567 - protein, 10 aa, Mus musculus
  REGION 1..10: note = Description of sequence: I23RB74
  REGION 1..10: note = Description of type of peptide: LCDR1
KSVSTSGSNF

SEQ ID NO: 568 - skipped

SEQ ID NO: 569 - protein, 9 aa, Mus musculus
  REGION 1..9: note = Description of sequence: I23RB74
  REGION 1..9: note = Description of type of peptide: LCDR3
QHSRELPHT

SEQ ID NO: 570 - protein, 8 aa, Mus musculus
  REGION 1..8: note = Description of sequence: I23RB76
  REGION 1..8: note = Description of type of peptide: HCDR1
GYTFTDYY

SEQ ID NO: 571 - protein, 8 aa, Mus musculus
  REGION 1..8: note = Description of sequence: I23RB76
  REGION 1..8: note = Description of type of peptide: HCDR2
ISPKNGRT

SEQ ID NO: 572 - protein, 11 aa, Mus musculus
  REGION 1..11: note = Description of sequence: I23RB76
  REGION 1..11: note = Description of type of peptide: HCDR3
AKSNGYYALDY

SEQ ID NO: 573 - protein, 6 aa, Mus musculus
  REGION 1..6: note = Description of sequence: I23RB76
  REGION 1..6: note = Description of type of peptide: LCDR1
QNIYKN

SEQ ID NO: 574 - skipped

SEQ ID NO: 575 - protein, 9 aa, Mus musculus
  REGION 1..9: note = Description of sequence: I23RB76
  REGION 1..9: note = Description of type of peptide: LCDR3
LQGYSTPWT

SEQ ID NO: 576 - protein, 8 aa, Mus musculus
  REGION 1..8: note = Description of sequence: I23RB77
  REGION 1..8: note = Description of type of peptide: HCDR1
GFSLSRYS

SEQ ID NO: 577 - protein, 7 aa, Mus musculus
  REGION 1..7: note = Description of sequence: I23RB77
  REGION 1..7: note = Description of type of peptide: HCDR2
IWGSGST

SEQ ID NO: 578 - protein, 14 aa, Mus musculus
  REGION 1..14: note = Description of sequence: I23RB77
  REGION 1..14: note = Description of type of peptide: HCDR3
ARVYYGGSPYAMDY

SEQ ID NO: 579 - protein, 10 aa, Mus musculus
  REGION 1..10: note = Description of sequence: I23RB77
  REGION 1..10: note = Description of type of peptide: LCDR1
ESVDSYGNSF

SEQ ID NO: 580 - skipped

SEQ ID NO: 581 - protein, 9 aa, Mus musculus
  REGION 1..9: note = Description of sequence: I23RB77
  REGION 1..9: note = Description of type of peptide: LCDR3
QQNNEEPNT

SEQ ID NO: 582 - protein, 8 aa, Mus musculus
  REGION 1..8: note = Description of sequence: I23RB78
  REGION 1..8: note = Description of type of peptide: HCDR1
GFTFSNYT

SEQ ID NO: 583 - protein, 8 aa, Mus musculus
  REGION 1..8: note = Description of sequence: I23RB78
  REGION 1..8: note = Description of type of peptide: HCDR2
ISSGGGNT

SEQ ID NO: 584 - protein, 11 aa, Mus musculus
  REGION 1..11: note = Description of sequence: I23RB78
  REGION 1..11: note = Description of type of peptide: HCDR3
ARRNYRRAMDY

SEQ ID NO: 585 - protein, 10 aa, Mus musculus
  REGION 1..10: note = Description of sequence: I23RB78
  REGION 1..10: note = Description of type of peptide: LCDR1
ESVDSYGISF

SEQ ID NO: 586 - skipped

SEQ ID NO: 587 - protein, 9 aa, Mus musculus
  REGION 1..9: note = Description of sequence: I23RB78
  REGION 1..9: note = Description of type of peptide: LCDR3
QQSNEDPWT

SEQ ID NO: 588 - protein, 8 aa, Mus musculus
  REGION 1..8: note = Description of sequence: I23RB79
  REGION 1..8: note = Description of type of peptide: HCDR1
GYTFTDYY

SEQ ID NO: 589 - protein, 8 aa, Mus musculus
  REGION 1..8: note = Description of sequence: I23RB79
  REGION 1..8: note = Description of type of peptide: HCDR2
IYPNNGDT

SEQ ID NO: 590 - protein, 13 aa, Mus musculus
  REGION 1..13: note = Description of sequence: I23RB79
  REGION 1..13: note = Description of type of peptide: HCDR3
ARGTLTGMYYFDY

SEQ ID NO: 591 - protein, 6 aa, Mus musculus
  REGION 1..6: note = Description of sequence: I23RB79
  REGION 1..6: note = Description of type of peptide: LCDR1
QSVIND

SEQ ID NO: 592 - skipped

SEQ ID NO: 593 - protein, 9 aa, Mus musculus
  REGION 1..9: note = Description of sequence: I23RB79
  REGION 1..9: note = Description of type of peptide: LCDR3
QQDYSSPPT

SEQ ID NO: 594 - protein, 8 aa, Mus musculus
  REGION 1..8: note = Description of sequence: I23RB80
  REGION 1..8: note = Description of type of peptide: HCDR1
GFSLTSYG

SEQ ID NO: 595 - protein, 7 aa, Mus musculus
  REGION 1..7: note = Description of sequence: I23RB80
  REGION 1..7: note = Description of type of peptide: HCDR2
IWSGVST

SEQ ID NO: 596 - protein, 11 aa, Mus musculus
  REGION 1..11: note = Description of sequence: I23RB80
  REGION 1..11: note = Description of type of peptide: HCDR3
ARSRGSYYFDY

SEQ ID NO: 597 - protein, 6 aa, Mus musculus
  REGION 1..6: note = Description of sequence: I23RB80
  REGION 1..6: note = Description of type of peptide: LCDR1
QNIRTA

SEQ ID NO: 598 - skipped

SEQ ID NO: 599 - protein, 9 aa, Mus musculus
  REGION 1..9: note = Description of sequence: I23RB80
  REGION 1..9: note = Description of type of peptide: LCDR3
LQHWNYPLT

SEQ ID NO: 600 - protein, 8 aa, Mus musculus
  REGION 1..8: note = Description of sequence: I23RB81
  REGION 1..8: note = Description of type of peptide: HCDR1
GFSLTSYA

SEQ ID NO: 601 - protein, 7 aa, Mus musculus
  REGION 1..7: note = Description of sequence: I23RB81
  REGION 1..7: note = Description of type of peptide: HCDR2
IWTGGGT

SEQ ID NO: 602 - protein, 15 aa, Mus musculus
  REGION 1..15: note = Description of sequence: I23RB81
  REGION 1..15: note = Description of type of peptide: HCDR3
ARNRDYSNYRWYFDV

SEQ ID NO: 603 - protein, 6 aa, Mus musculus
  REGION 1..6: note = Description of sequence: I23RB81
  REGION 1..6: note = Description of type of peptide: LCDR1
QDVSTA

SEQ ID NO: 604 - skipped

SEQ ID NO: 605 - protein, 9 aa, Mus musculus
  REGION 1..9: note = Description of sequence: I23RB81
  REGION 1..9: note = Description of type of peptide: LCDR3
QQHYSTPLT

SEQ ID NO: 606 - protein, 8 aa, Mus musculus
  REGION 1..8: note = Description of sequence: I23RB82
  REGION 1..8: note = Description of type of peptide: HCDR1
GFSLTNYA

SEQ ID NO: 607 - protein, 7 aa, Mus musculus
  REGION 1..7: note = Description of sequence: I23RB82
  REGION 1..7: note = Description of type of peptide: HCDR2
IWSDGST

SEQ ID NO: 608 - protein, 14 aa, Mus musculus
  REGION 1..14: note = Description of sequence: I23RB82
  REGION 1..14: note = Description of type of peptide: HCDR3
ARSRSNYGRWYFDV

SEQ ID NO: 609 - protein, 6 aa, Mus musculus
  REGION 1..6: note = Description of sequence: I23RB82
  REGION 1..6: note = Description of type of peptide: LCDR1
QDVSTA

SEQ ID NO: 610 - skipped

SEQ ID NO: 611 - protein, 9 aa, Mus musculus
  REGION 1..9: note = Description of sequence: I23RB82
  REGION 1..9: note = Description of type of peptide: LCDR3
QQHYSTPYT

SEQ ID NO: 612 - protein, 8 aa, Mus musculus
  REGION 1..8: note = Description of sequence: I23RB83
  REGION 1..8: note = Description of type of peptide: HCDR1
GFSLTNYD

SEQ ID NO: 613 - protein, 7 aa, Mus musculus
  REGION 1..7: note = Description of sequence: I23RB83
  REGION 1..7: note = Description of type of peptide: HCDR2
IWSDGST

SEQ ID NO: 614 - protein, 15 aa, Mus musculus
  REGION 1..15: note = Description of sequence: I23RB83
  REGION 1..15: note = Description of type of peptide: HCDR3
ARNNYYRYGRNPMDY

SEQ ID NO: 615 - protein, 6 aa, Mus musculus
  REGION 1..6: note = Description of sequence: I23RB83
  REGION 1..6: note = Description of type of peptide: LCDR1
QTIGSW

SEQ ID NO: 616 - skipped

SEQ ID NO: 617 - protein, 9 aa, Mus musculus
  REGION 1..9: note = Description of sequence: I23RB83
  REGION 1..9: note = Description of type of peptide: LCDR3
QQLYSSPLT

SEQ ID NO: 618 - protein, 8 aa, Mus musculus
  REGION 1..8: note = Description of sequence: I23RB85
  REGION 1..8: note = Description of type of peptide: HCDR1
GFSFNTYA

SEQ ID NO: 619 - protein, 7 aa, Mus musculus
  REGION 1..7: note = Description of sequence: I23RB85
  REGION 1..7: note = Description of type of peptide: HCDR2
LWPGGGI

SEQ ID NO: 620 - protein, 15 aa, Mus musculus
  REGION 1..15: note = Description of sequence: I23RB85
  REGION 1..15: note = Description of type of peptide: HCDR3
ARNWRHYDGSYAMDF

SEQ ID NO: 621 - protein, 11 aa, Mus musculus
  REGION 1..11: note = Description of sequence: I23RB85
  REGION 1..11: note = Description of type of peptide: LCDR1
QSLVHSNGNTY

SEQ ID NO: 622 - skipped

SEQ ID NO: 623 - protein, 9 aa, Mus musculus
  REGION 1..9: note = Description of sequence: I23RB85
  REGION 1..9: note = Description of type of peptide: LCDR3
SQSTHVPWT

SEQ ID NO: 624 - protein, 8 aa, Mus musculus
  REGION 1..8: note = Description of sequence: I23RB86
  REGION 1..8: note = Description of type of peptide: HCDR1
GYTFTSYW

SEQ ID NO: 625 - protein, 8 aa, Mus musculus
  REGION 1..8: note = Description of sequence: I23RB86
  REGION 1..8: note = Description of type of peptide: HCDR2
IDPSDSYT

SEQ ID NO: 626 - protein, 12 aa, Mus musculus
  REGION 1..12: note = Description of sequence: I23RB86
  REGION 1..12: note = Description of type of peptide: HCDR3
ARSPYDYDWGAY

SEQ ID NO: 627 - protein, 6 aa, Mus musculus
  REGION 1..6: note = Description of sequence: I23RB86
  REGION 1..6: note = Description of type of peptide: LCDR1
QGISSN

SEQ ID NO: 628 - skipped

SEQ ID NO: 629 - protein, 9 aa, Mus musculus
  REGION 1..9: note = Description of sequence: I23RB86
  REGION 1..9: note = Description of type of peptide: LCDR3
VQYAQFPWT

SEQ ID NO: 630 - protein, 8 aa, Mus musculus
  REGION 1..8: note = Description of sequence: I23RB87
  REGION 1..8: note = Description of type of peptide: HCDR1
GYTFTNYV

SEQ ID NO: 631 - protein, 8 aa, Mus musculus
  REGION 1..8: note = Description of sequence: I23RB87
  REGION 1..8: note = Description of type of peptide: HCDR2
INPYDASP

SEQ ID NO: 632 - protein, 11 aa, Mus musculus
  REGION 1..11: note = Description of sequence: I23RB87
  REGION 1..11: note = Description of type of peptide: HCDR3
TRDAKLDYFDY

SEQ ID NO: 633 - protein, 6 aa, Mus musculus
  REGION 1..6: note = Description of sequence: I23RB87
  REGION 1..6: note = Description of type of peptide: LCDR1
QDISNY

SEQ ID NO: 634 - skipped

SEQ ID NO: 635 - protein, 9 aa, Mus musculus
  REGION 1..9: note = Description of sequence: I23RB87
  REGION 1..9: note = Description of type of peptide: LCDR3
QQGITLPWT

SEQ ID NO: 636 - protein, 8 aa, Mus musculus
  REGION 1..8: note = Description of sequence: I23RB91
  REGION 1..8: note = Description of type of peptide: HCDR1
GYTFTDYI

SEQ ID NO: 637 - protein, 8 aa, Mus musculus
  REGION 1..8: note = Description of sequence: I23RB91
  REGION 1..8: note = Description of type of peptide: HCDR2
ISPNYGGT

SEQ ID NO: 638 - protein, 11 aa, Mus musculus
  REGION 1..11: note = Description of sequence: I23RB91
  REGION 1..11: note = Description of type of peptide: HCDR3
ARFNNYYYFDY

SEQ ID NO: 639 - protein, 6 aa, Mus musculus
  REGION 1..6: note = Description of sequence: I23RB91
  REGION 1..6: note = Description of type of peptide: LCDR1
QDINSY

SEQ ID NO: 640 - skipped

SEQ ID NO: 641 - protein, 9 aa, Mus musculus
  REGION 1..9: note = Description of sequence: I23RB91
  REGION 1..9: note = Description of type of peptide: LCDR3
LQYDEFPYT

SEQ ID NO: 642 - protein, 8 aa, Mus musculus
  REGION 1..8: note = Description of sequence: I23RB92
  REGION 1..8: note = Description of type of peptide: HCDR1
GYTFTDHT

SEQ ID NO: 643 - protein, 8 aa, Mus musculus
  REGION 1..8: note = Description of sequence: I23RB92
  REGION 1..8: note = Description of type of peptide: HCDR2
IYPKSGGT

SEQ ID NO: 644 - protein, 12 aa, Mus musculus
  REGION 1..12: note = Description of sequence: I23RB92
  REGION 1..12: note = Description of type of peptide: HCDR3
ARWGLRRDGFVY

SEQ ID NO: 645 - protein, 10 aa, Mus musculus
  REGION 1..10: note = Description of sequence: I23RB92
  REGION 1..10: note = Description of type of peptide: LCDR1
QSVSTSKYDY

SEQ ID NO: 646 - skipped

SEQ ID NO: 647 - protein, 9 aa, Mus musculus
  REGION 1..9: note = Description of sequence: I23RB92
  REGION 1..9: note = Description of type of peptide: LCDR3
QHTWEIPYT

SEQ ID NO: 648 - protein, 8 aa, Mus musculus
  REGION 1..8: note = Description of sequence: I23RB93
  REGION 1..8: note = Description of type of peptide: HCDR1
GFSLTSYG

SEQ ID NO: 649 - protein, 7 aa, Mus musculus
  REGION 1..7: note = Description of sequence: I23RB93
  REGION 1..7: note = Description of type of peptide: HCDR2
IWSGVST

SEQ ID NO: 650 - protein, 11 aa, Mus musculus
  REGION 1..11: note = Description of sequence: I23RB93
  REGION 1..11: note = Description of type of peptide: HCDR3
ARSRGSYYFDY

SEQ ID NO: 651 - protein, 6 aa, Mus musculus
  REGION 1..6: note = Description of sequence: I23RB93
  REGION 1..6: note = Description of type of peptide: LCDR1
QSISNN

SEQ ID NO: 652 - skipped

SEQ ID NO: 653 - protein, 9 aa, Mus musculus
  REGION 1..9: note = Description of sequence: I23RB93
  REGION 1..9: note = Description of type of peptide: LCDR3
QQSNSWPLT

SEQ ID NO: 654 - protein, 8 aa, Mus musculus
  REGION 1..8: note = Description of sequence: I23RB94
  REGION 1..8: note = Description of type of peptide: HCDR1
GYTFTNYG

SEQ ID NO: 655 - protein, 8 aa, Mus musculus
  REGION 1..8: note = Description of sequence: I23RB94
  REGION 1..8: note = Description of type of peptide: HCDR2
INTNTGEP

SEQ ID NO: 656 - protein, 16 aa, Mus musculus
  REGION 1..16: note = Description of sequence: I23RB94
  REGION 1..16: note = Description of type of peptide: HCDR3
ARVRQTARATRGYFDV

SEQ ID NO: 657 - protein, 6 aa, Mus musculus
  REGION 1..6: note = Description of sequence: I23RB94
  REGION 1..6: note = Description of type of peptide: LCDR1
QDVNTA

SEQ ID NO: 658 - skipped

SEQ ID NO: 659 - protein, 9 aa, Mus musculus
  REGION 1..9: note = Description of sequence: I23RB94
  REGION 1..9: note = Description of type of peptide: LCDR3
QQHYTSPLT

SEQ ID NO: 660 - protein, 8 aa, Mus musculus
  REGION 1..8: note = Description of sequence: I23RB95
  REGION 1..8: note = Description of type of peptide: HCDR1
GFTFSDYY

SEQ ID NO: 661 - protein, 8 aa, Mus musculus
  REGION 1..8: note = Description of sequence: I23RB95
  REGION 1..8: note = Description of type of peptide: HCDR2
INYDGSNT

SEQ ID NO: 662 - protein, 11 aa, Mus musculus
  REGION 1..11: note = Description of sequence: I23RB95
  REGION 1..11: note = Description of type of peptide: HCDR3
AREGYDEAMDY

SEQ ID NO: 663 - protein, 6 aa, Mus musculus
  REGION 1..6: note = Description of sequence: I23RB95
  REGION 1..6: note = Description of type of peptide: LCDR1
QDVGTA

SEQ ID NO: 664 - skipped

SEQ ID NO: 665 - protein, 9 aa, Mus musculus
  REGION 1..9: note = Description of sequence: I23RB95
  REGION 1..9: note = Description of type of peptide: LCDR3
QQYSTYPYT

SEQ ID NO: 666 - protein, 8 aa, Mus musculus
  REGION 1..8: note = Description of sequence: I23RB98
  REGION 1..8: note = Description of type of peptide: HCDR1
GYTFTNYY

SEQ ID NO: 667 - protein, 8 aa, Mus musculus
  REGION 1..8: note = Description of sequence: I23RB98
  REGION 1..8: note = Description of type of peptide: HCDR2
IYPNSGDT

SEQ ID NO: 668 - protein, 12 aa, Mus musculus
  REGION 1..12: note = Description of sequence: I23RB98
  REGION 1..12: note = Description of type of peptide: HCDR3
ARFGGFYDAMDY

SEQ ID NO: 669 - protein, 7 aa, Mus musculus
  REGION 1..7: note = Description of sequence: I23RB98
  REGION 1..7: note = Description of type of peptide: LCDR1
SSVSSSY

SEQ ID NO: 670 - skipped

SEQ ID NO: 671 - protein, 9 aa, Mus musculus
  REGION 1..9: note = Description of sequence: I23RB98
  REGION 1..9: note = Description of type of peptide: LCDR3
HQYHRSPFT

SEQ ID NO: 672 - protein, 453 aa, Homo sapiens
  REGION 1..453: note = Description of sequence: I23RB1
  REGION 1..453: note = Description of type of peptide: Heavy Chain
QVQLVQSGAEVKKPGSSVKVSCKASGGTFKNYAISWVRQAPGQGLEWMGWIRPIFGTAYYAQKFQGRVTITADESTSTAYMELSSLRSEDTAVYYCARDSGSRYAGRYAFDYWGQGTLVTVSSAKTTAPSVYPLAPVCGDTTGSSVTLGCLVKGYFPEPVTLTWNSGSLSSGVHTFPAVLQSDLYTLSSSVTVTSSTWPSQSITCNVAHPASSTKVDKKIEPRGPTIKPCPPCKCPAPNLLGGPSVFIFPPKIKDVLMISLSPIVTCVVVDVSEDDPDVQISWFVNNVEVHTAQTQTHREDYNSTLRVVSALPIQHQDWMSGKEFKCKVNNKDLPAPIERTISKPKGSVRAPQVYVLPPPEEEMTKKQVTLTCMVTDFMPEDIYVEWTNNGKTELNYKNTEPVLDSDGSYFMYSKLRVEKKNWVERNSYSCSVVHEGLHNHHTTKSFSRTPGK

SEQ ID NO: 673 - protein, 214 aa, Homo sapiens
  REGION 1..214: note = Description of sequence: I23RB1
  REGION 1..214: note = Description of type of peptide: Light Chain
EIVLTQSPATLSLSPGERATLSCRASQSVSSYLAWYQQKPGQAPRLLIYDASNRATGIPARFSGSGSGTDFTLTISSLEPEDFAVYYCQQRSNWPLTFGQGTKVEIKRADAAPTVSIFPPSSEQLTSGGASVVCFLNNFYPKDINVKWKIDGSERQNGVLNSWTDQDSKDSTYSMSSTLTLTKDEYERHNSYTCEATHKTSTSPIVKSFNRNEC

SEQ ID NO: 674 - protein, 452 aa, Homo sapiens
  REGION 1..452: note = Description of sequence: I23RB2
  REGION 1..452: note = Description of type of peptide: Heavy Chain
QVQLVQSGAEVKKPGSSVKVSCKASGGTFSSYAISWVRQAPGQGLEWMGGIIPIFGTANYAQKFQGRVTITADESTSTAYMELSSLRSEDTAVYYCARDRYRYLGANGFDYWGQGTLVTVSSAKTTAPSVYPLAPVCGDTTGSSVTLGCLVKGYFPEPVTLTWNSGSLSSGVHTFPAVLQSDLYTLSSSVTVTSSTWPSQSITCNVAHPASSTKVDKKIEPRGPTIKPCPPCKCPAPNLLGGPSVFIFPPKIKDVLMISLSPIVTCVVVDVSEDDPDVQISWFVNNVEVHTAQTQTHREDYNSTLRVVSALPIQHQDWMSGKEFKCKVNNKDLPAPIERTISKPKGSVRAPQVYVLPPPEEEMTKKQVTLTCMVTDFMPEDIYVEWTNNGKTELNYKNTEPVLDSDGSYFMYSKLRVEKKNWVERNSYSCSVVHEGLHNHHTTKSFSRTPGK

SEQ ID NO: 675 - protein, 214 aa, Homo sapiens; identical to SEQ ID NO: 673
  REGION 1..214: note = Description of sequence: I23RB2
  REGION 1..214: note = Description of type of peptide: Light Chain

SEQ ID NO: 676 - protein, 455 aa, Homo sapiens
  REGION 1..455: note = Description of sequence: I23RB3
  REGION 1..455: note = Description of type of peptide: Heavy Chain
QVQLVQSGAEVKKPGSSVKVSCKASGGTFKSYSIHWVRQAPGQGLEWMGGIIPYFGYANYAQKFQGRVTITADESTSTAYMELSSLRSEDTAVYYCARERGYYGSIYYGGGFDYWGQGTLVTVSSAKTTAPSVYPLAPVCGDTTGSSVTLGCLVKGYFPEPVTLTWNSGSLSSGVHTFPAVLQSDLYTLSSSVTVTSSTWPSQSITCNVAHPASSTKVDKKIEPRGPTIKPCPPCKCPAPNLLGGPSVFIFPPKIKDVLMISLSPIVTCVVVDVSEDDPDVQISWFVNNVEVHTAQTQTHREDYNSTLRVVSALPIQHQDWMSGKEFKCKVNNKDLPAPIERTISKPKGSVRAPQVYVLPPPEEEMTKKQVTLTCMVTDFMPEDIYVEWTNNGKTELNYKNTEPVLDSDGSYFMYSKLRVEKKNWVERNSYSCSVVHEGLHNHHTTKSFSRTPGK

SEQ ID NO: 677 - protein, 214 aa, Homo sapiens; identical to SEQ ID NO: 673
  REGION 1..214: note = Description of sequence: I23RB3
  REGION 1..214: note = Description of type of peptide: Light Chain

SEQ ID NO: 678 - protein, 457 aa, Homo sapiens
  REGION 1..457: note = Description of sequence: I23RB4
  REGION 1..457: note = Description of type of peptide: Heavy Chain
QVQLVQSGAEVKKPGSSVKVSCKASGGTFKTYAIHWVRQAPGQGLEWMGWIIPIFGTANYAQKFQGRVTITADESTSTAYMELSSLRSEDTAVYYCARDGGYYGSRYYPRSYYFDYWGQGTLVTVSSAKTTAPSVYPLAPVCGDTTGSSVTLGCLVKGYFPEPVTLTWNSGSLSSGVHTFPAVLQSDLYTLSSSVTVTSSTWPSQSITCNVAHPASSTKVDKKIEPRGPTIKPCPPCKCPAPNLLGGPSVFIFPPKIKDVLMISLSPIVTCVVVDVSEDDPDVQISWFVNNVEVHTAQTQTHREDYNSTLRVVSALPIQHQDWMSGKEFKCKVNNKDLPAPIERTISKPKGSVRAPQVYVLPPPEEEMTKKQVTLTCMVTDFMPEDIYVEWTNNGKTELNYKNTEPVLDSDGSYFMYSKLRVEKKNWVERNSYSCSVVHEGLHNHHTTKSFSRTPGK

SEQ ID NO: 679 - protein, 214 aa, Homo sapiens; identical to SEQ ID NO: 673
  REGION 1..214: note = Description of sequence: I23RB4
  REGION 1..214: note = Description of type of peptide: Light Chain

SEQ ID NO: 680 - protein, 453 aa, Homo sapiens
  REGION 1..453: note = Description of sequence: I23RB5
  REGION 1..453: note = Description of type of peptide: Heavy Chain
QVQLVQSGAEVKKPGSSVKVSCKASGGTFSSYAISWVRQAPGQGLEWMGGIIPIFGTANYAQKFQGRVTITADESTSTAYMELSSLRSEDTAVYYCARDSYYSTVTYYYFDYWGQGTLVTVSSAKTTAPSVYPLAPVCGDTTGSSVTLGCLVKGYFPEPVTLTWNSGSLSSGVHTFPAVLQSDLYTLSSSVTVTSSTWPSQSITCNVAHPASSTKVDKKIEPRGPTIKPCPPCKCPAPNLLGGPSVFIFPPKIKDVLMISLSPIVTCVVVDVSEDDPDVQISWFVNNVEVHTAQTQTHREDYNSTLRVVSALPIQHQDWMSGKEFKCKVNNKDLPAPIERTISKPKGSVRAPQVYVLPPPEEEMTKKQVTLTCMVTDFMPEDIYVEWTNNGKTELNYKNTEPVLDSDGSYFMYSKLRVEKKNWVERNSYSCSVVHEGLHNHHTTKSFSRTPGK

SEQ ID NO: 681 - protein, 214 aa, Homo sapiens
  REGION 1..214: note = Description of sequence: I23RB5
  REGION 1..214: note = Description of type of peptide: Light Chain
DIQMTQSPSSLSASVGDRVTITCRASQSISSYLNWYQQKPGKAPKLLIYAASSLQSGVPSRFSGSGSGTDFTLTISSLQPEDFATYYCQQSYSTPLTFGQGTKVEIKRADAAPTVSIFPPSSEQLTSGGASVVCFLNNFYPKDINVKWKIDGSERQNGVLNSWTDQDSKDSTYSMSSTLTLTKDEYERHNSYTCEATHKTSTSPIVKSFNRNEC

SEQ ID NO: 682 - protein, 451 aa, Homo sapiens
  REGION 1..451: note = Description of sequence: I23RB6
  REGION 1..451: note = Description of type of peptide: Heavy Chain
QVQLVQSGAEVKKPGSSVKVSCKASGGTFSSYAISWVRQAPGQGLEWMGGIIPIFGTANYAQKFQGRVTITADESTSTAYMELSSLRSEDTAVYYCARGRYIRSYDYFDYWGQGTLVTVSSAKTTAPSVYPLAPVCGDTTGSSVTLGCLVKGYFPEPVTLTWNSGSLSSGVHTFPAVLQSDLYTLSSSVTVTSSTWPSQSITCNVAHPASSTKVDKKIEPRGPTIKPCPPCKCPAPNLLGGPSVFIFPPKIKDVLMISLSPIVTCVVVDVSEDDPDVQISWFVNNVEVHTAQTQTHREDYNSTLRVVSALPIQHQDWMSGKEFKCKVNNKDLPAPIERTISKPKGSVRAPQVYVLPPPEEEMTKKQVTLTCMVTDFMPEDIYVEWTNNGKTELNYKNTEPVLDSDGSYFMYSKLRVEKKNWVERNSYSCSVVHEGLHNHHTTKSFSRTPGK

SEQ ID NO: 683 - protein, 220 aa, Homo sapiens
  REGION 1..220: note = Description of sequence: I23RB6
  REGION 1..220: note = Description of type of peptide: Light Chain
DIVMTQSPDSLAVSLGERATINCKSSQSVLYSSNNKNYLAWYQQKPGQPPKLLIYWASTRESGVPDRFSGSGSGTDFTLTISSLQAEDVAVYYCQQYYSTPLTFGQGTKVEIKRADAAPTVSIFPPSSEQLTSGGASVVCFLNNFYPKDINVKWKIDGSERQNGVLNSWTDQDSKDSTYSMSSTLTLTKDEYERHNSYTCEATHKTSTSPIVKSFNRNEC

SEQ ID NO: 684 - protein, 452 aa, Mus musculus
  REGION 1..452: note = Description of sequence: I23RB7
  REGION 1..452: note = Description of type of peptide: Heavy Chain
QIQLVQSGPELKKPGETVKISCKASGYTFTTYGMSWVKQAPGKGLKWMGWINTYSGVPTYADDFKGRFAFSLETSASTAYLQINNLKNEDTATYYCARRDRYGYVAGAFAYWGQGTLVTVSSAKTTAPSVYPLAPVCGDTTGSSVTLGCLVKGYFPEPVTLTWNSGSLSSGVHTFPAVLQSDLYTLSSSVTVTSSTWPSQSITCNVAHPASSTKVDKKIEPRGPTIKPCPPCKCPAPNLLGGPSVFIFPPKIKDVLMISLSPIVTCVVVDVSEDDPDVQISWFVNNVEVHTAQTQTHREDYNSTLRVVSALPIQHQDWMSGKEFKCKVNNKDLPAPIERTISKPKGSVRAPQVYVLPPPEEEMTKKQVTLTCMVTDFMPEDIYVEWTNNGKTELNYKNTEPVLDSDGSYFMYSKLRVEKKNWVERNSYSCSVVHEGLHNHHTTKSFSRTPGK

SEQ ID NO: 685 - protein, 213 aa, Mus musculus
  REGION 1..213: note = Description of sequence: I23RB7
  REGION 1..213: note = Description of type of peptide: Light Chain
QIVLTQSPAIMSASPGEKVTMTCSASSSVSYMYWYQQKPGSSPRLLIYDTSNLASGVPVRFSGSGSGTSYSLTISRMEAEDAATYYCQQWSSYPWTFGGGTKLEIKRADAAPTVSIFPPSSEQLTSGGASVVCFLNNFYPKDINVKWKIDGSERQNGVLNSWTDQDSKDSTYSMSSTLTLTKDEYERHNSYTCEATHKTSTSPIVKSFNRNEC

SEQ ID NO: 686 - protein, 455 aa, Homo sapiens
  REGION 1..455: note = Description of sequence: I23RB8
  REGION 1..455: note = Description of type of peptide: Heavy Chain
QVQLVQSGAEVKKPGSSVKVSCKASGGTFKTDYINWVRQAPGQGLEWMGGIIPIFGTANYAQKFQGRVTITADESTSTAYMELSSLRSEDTAVYYCARGPSYAYGSRTYGYFDYWGQGTLVTVSSAKTTAPSVYPLAPVCGDTTGSSVTLGCLVKGYFPEPVTLTWNSGSLSSGVHTFPAVLQSDLYTLSSSVTVTSSTWPSQSITCNVAHPASSTKVDKKIEPRGPTIKPCPPCKCPAPNLLGGPSVFIFPPKIKDVLMISLSPIVTCVVVDVSEDDPDVQISWFVNNVEVHTAQTQTHREDYNSTLRVVSALPIQHQDWMSGKEFKCKVNNKDLPAPIERTISKPKGSVRAPQVYVLPPPEEEMTKKQVTLTCMVTDFMPEDIYVEWTNNGKTELNYKNTEPVLDSDGSYFMYSKLRVEKKNWVERNSYSCSVVHEGLHNHHTTKSFSRTPGK

SEQ ID NO: 687 - protein, 214 aa, Homo sapiens; identical to SEQ ID NO: 673
  REGION 1..214: note = Description of sequence: I23RB8
  REGION 1..214: note = Description of type of peptide: Light Chain

SEQ ID NO: 688 - protein, 457 aa, Homo sapiens
  REGION 1..457: note = Description of sequence: I23RB9
  REGION 1..457: note = Description of type of peptide: Heavy Chain
QVQLVQSGAEVKKPGSSVKVSCKASGGTFSSYAISWVRQAPGQGLEWMGGIIPIFGTANYAQKFQGRVTITADESTSTAYMELSSLRSEDTAVYYCARDRSYSYGLSGLGYYGFDYWGQGTLVTVSSAKTTAPSVYPLAPVCGDTTGSSVTLGCLVKGYFPEPVTLTWNSGSLSSGVHTFPAVLQSDLYTLSSSVTVTSSTWPSQSITCNVAHPASSTKVDKKIEPRGPTIKPCPPCKCPAPNLLGGPSVFIFPPKIKDVLMISLSPIVTCVVVDVSEDDPDVQISWFVNNVEVHTAQTQTHREDYNSTLRVVSALPIQHQDWMSGKEFKCKVNNKDLPAPIERTISKPKGSVRAPQVYVLPPPEEEMTKKQVTLTCMVTDFMPEDIYVEWTNNGKTELNYKNTEPVLDSDGSYFMYSKLRVEKKNWVERNSYSCSVVHEGLHNHHTTKSFSRTPGK

SEQ ID NO: 689 - protein, 214 aa, Homo sapiens; identical to SEQ ID NO: 673
  REGION 1..214: note = Description of sequence: I23RB9
  REGION 1..214: note = Description of type of peptide: Light Chain

SEQ ID NO: 690 - protein, 453 aa, Homo sapiens
  REGION 1..453: note = Description of sequence: I23RB10
  REGION 1..453: note = Description of type of peptide: Heavy Chain
QVQLVQSGAEVKKPGSSVKVSCKASGGTFSSYAIHWVRQAPGQGLEWMGRIIPISGRANYAQKFQGRVTITADESTSTAYMELSSLRSEDTAVYYCARDSYPSYGSGGAFGYWGQGTLVTVSSAKTTAPSVYPLAPVCGDTTGSSVTLGCLVKGYFPEPVTLTWNSGSLSSGVHTFPAVLQSDLYTLSSSVTVTSSTWPSQSITCNVAHPASSTKVDKKIEPRGPTIKPCPPCKCPAPNLLGGPSVFIFPPKIKDVLMISLSPIVTCVVVDVSEDDPDVQISWFVNNVEVHTAQTQTHREDYNSTLRVVSALPIQHQDWMSGKEFKCKVNNKDLPAPIERTISKPKGSVRAPQVYVLPPPEEEMTKKQVTLTCMVTDFMPEDIYVEWTNNGKTELNYKNTEPVLDSDGSYFMYSKLRVEKKNWVERNSYSCSVVHEGLHNHHTTKSFSRTPGK

SEQ ID NO: 691 - protein, 220 aa, Homo sapiens; identical to SEQ ID NO: 683
  REGION 1..220: note = Description of sequence: I23RB10
  REGION 1..220: note = Description of type of peptide: Light Chain

SEQ ID NO: 692 - protein, 447 aa, Homo sapiens
  REGION 1..447: note = Description of sequence: I23RB259
  REGION 1..447: note = Description of type of peptide: Heavy Chain
QVQLVQSGAEVKKPGSSVKVSCKASGGTFSSYGISWVRQAPGQGLEWMGWISPIFGTTNYAQKFQGRVTITADESTSTAYMELSSLRSEDTAVYYCARMMMQSLDYWGQGTLVTVSSAKTTAPSVYPLAPVCGDTTGSSVTLGCLVKGYFPEPVTLTWNSGSLSSGVHTFPAVLQSDLYTLSSSVTVTSSTWPSQSITCNVAHPASSTKVDKKIEPRGPTIKPCPPCKCPAPNLLGGPSVFIFPPKIKDVLMISLSPIVTCVVVDVSEDDPDVQISWFVNNVEVHTAQTQTHREDYNSTLRVVSALPIQHQDWMSGKEFKCKVNNKDLPAPIERTISKPKGSVRAPQVYVLPPPEEEMTKKQVTLTCMVTDFMPEDIYVEWTNNGKTELNYKNTEPVLDSDGSYFMYSKLRVEKKNWVERNSYSCSVVHEGLHNHHTTKSFSRTPGK

SEQ ID NO: 693 - protein, 214 aa, Homo sapiens
  REGION 1..214: note = Description of sequence: I23RB259
  REGION 1..214: note = Description of type of peptide: Light Chain
DIQMTQSPSSLSASVGDRVTITCRASQSISNDLNWYQQKPGKAPKLLIYAASSLQSGVPSRFSGSGSGTDFTLTISSLQPEDFATYYCQQSYSTPLTFGQGTKVEIKRADAAPTVSIFPPSSEQLTSGGASVVCFLNNFYPKDINVKWKIDGSERQNGVLNSWTDQDSKDSTYSMSSTLTLTKDEYERHNSYTCEATHKTSTSPIVKSFNRNEC

SEQ ID NO: 694 - protein, 449 aa, Homo sapiens
  REGION 1..449: note = Description of sequence: I23RB260
  REGION 1..449: note = Description of type of peptide: Heavy Chain
QVQLVQSGAEVKKPGSSVKVSCKASGGTFSSYGISWVRQAPGQGLEWMGGIIPIFGTANYAQKFQGRVTITADESTSTAYMELSSLRSEDTAVYYCARDFGWSLWFDYWGQGTLVTVSSAKTTAPSVYPLAPVCGDTTGSSVTLGCLVKGYFPEPVTLTWNSGSLSSGVHTFPAVLQSDLYTLSSSVTVTSSTWPSQSITCNVAHPASSTKVDKKIEPRGPTIKPCPPCKCPAPNLLGGPSVFIFPPKIKDVLMISLSPIVTCVVVDVSEDDPDVQISWFVNNVEVHTAQTQTHREDYNSTLRVVSALPIQHQDWMSGKEFKCKVNNKDLPAPIERTISKPKGSVRAPQVYVLPPPEEEMTKKQVTLTCMVTDFMPEDIYVEWTNNGKTELNYKNTEPVLDSDGSYFMYSKLRVEKKNWVERNSYSCSVVHEGLHNHHTTKSFSRTPGK

SEQ ID NO: 695 - protein, 220 aa, Homo sapiens
  REGION 1..220: note = Description of sequence: I23RB260
  REGION 1..220: note = Description of type of peptide: Light Chain
DIVMTQSPDSLAVSLGERATINCKSSQSVLYSSNNKNYLAWYQQKPGQPPKLLIYSASTRESGVPDRFSGSGSGTDFTLTISSLQAEDVAVYYCQQSFHVPWTFGQGTKVEIKRADAAPTVSIFPPSSEQLTSGGASVVCFLNNFYPKDINVKWKIDGSERQNGVLNSWTDQDSKDSTYSMSSTLTLTKDEYERHNSYTCEATHKTSTSPIVKSFNRNEC

SEQ ID NO: 696 - protein, 447 aa, Homo sapiens
  REGION 1..447: note = Description of sequence: I23RB261
  REGION 1..447: note = Description of type of peptide: Heavy Chain
QVQLVQSGAEVKKPGSSVKVSCKASGGTFSSYAISWVRQAPGQGLEWMGWISPYFGTANYAQKFQGRVTITADESTSTAYMELSSLRSEDTAVYYCARMYRQGFDYWGQGTLVTVSSAKTTAPSVYPLAPVCGDTTGSSVTLGCLVKGYFPEPVTLTWNSGSLSSGVHTFPAVLQSDLYTLSSSVTVTSSTWPSQSITCNVAHPASSTKVDKKIEPRGPTIKPCPPCKCPAPNLLGGPSVFIFPPKIKDVLMISLSPIVTCVVVDVSEDDPDVQISWFVNNVEVHTAQTQTHREDYNSTLRVVSALPIQHQDWMSGKEFKCKVNNKDLPAPIERTISKPKGSVRAPQVYVLPPPEEEMTKKQVTLTCMVTDFMPEDIYVEWTNNGKTELNYKNTEPVLDSDGSYFMYSKLRVEKKNWVERNSYSCSVVHEGLHNHHTTKSFSRTPGK

SEQ ID NO: 697 - protein, 214 aa, Homo sapiens
  REGION 1..214: note = Description of sequence: I23RB261
  REGION 1..214: note = Description of type of peptide: Light Chain
DIQMTQSPSSLSASVGDRVTITCRASQSINDDLNWYQQKPGKAPKLLIYAASSLQSGVPSRFSGSGSGTDFTLTISSLQPEDFATYYCQQSYSTPLTFGQGTKVEIKRADAAPTVSIFPPSSEQLTSGGASVVCFLNNFYPKDINVKWKIDGSERQNGVLNSWTDQDSKDSTYSMSSTLTLTKDEYERHNSYTCEATHKTSTSPIVKSFNRNEC

SEQ ID NO: 698 - protein, 447 aa, Homo sapiens
  REGION 1..447: note = Description of sequence: I23RB262
  REGION 1..447: note = Description of type of peptide: Heavy Chain
QVQLVQSGAEVKKPGSSVKVSCKASGGTFSSYGISWVRQAPGQGLEWMGWISAIFGTANYAQKFQGRVTITADESTSTAYMELSSLRSEDTAVYYCARMLKQGFDYWGQGTLVTVSSAKTTAPSVYPLAPVCGDTTGSSVTLGCLVKGYFPEPVTLTWNSGSLSSGVHTFPAVLQSDLYTLSSSVTVTSSTWPSQSITCNVAHPASSTKVDKKIEPRGPTIKPCPPCKCPAPNLLGGPSVFIFPPKIKDVLMISLSPIVTCVVVDVSEDDPDVQISWFVNNVEVHTAQTQTHREDYNSTLRVVSALPIQHQDWMSGKEFKCKVNNKDLPAPIERTISKPKGSVRAPQVYVLPPPEEEMTKKQVTLTCMVTDFMPEDIYVEWTNNGKTELNYKNTEPVLDSDGSYFMYSKLRVEKKNWVERNSYSCSVVHEGLHNHHTTKSFSRTPGK

SEQ ID NO: 699 - protein, 214 aa, Homo sapiens
  REGION 1..214: note = Description of sequence: I23RB262
  REGION 1..214: note = Description of type of peptide: Light Chain
DIQMTQSPSSLSASVGDRVTITCRASQSINKDLNWYQQKPGKAPKLLIYFASSLQSGVPSRFSGSGSGTDFTLTISSLQPEDFATYYCQQSYSTPLTFGQGTKVEIKRADAAPTVSIFPPSSEQLTSGGASVVCFLNNFYPKDINVKWKIDGSERQNGVLNSWTDQDSKDSTYSMSSTLTLTKDEYERHNSYTCEATHKTSTSPIVKSFNRNEC

SEQ ID NO: 700 - protein, 447 aa, Homo sapiens
  REGION 1..447: note = Description of sequence: I23RB263
  REGION 1..447: note = Description of type of peptide: Heavy Chain
QVQLVQSGAEVKKPGSSVKVSCKASGGTFSSYAISWVRQAPGQGLEWMGGIIPIFGTANYAQKFQGRVTITADESTSTAYMELSSLRSEDTAVYYCARFHRFWLDYWGQGTLVTVSSAKTTAPSVYPLAPVCGDTTGSSVTLGCLVKGYFPEPVTLTWNSGSLSSGVHTFPAVLQSDLYTLSSSVTVTSSTWPSQSITCNVAHPASSTKVDKKIEPRGPTIKPCPPCKCPAPNLLGGPSVFIFPPKIKDVLMISLSPIVTCVVVDVSEDDPDVQISWFVNNVEVHTAQTQTHREDYNSTLRVVSALPIQHQDWMSGKEFKCKVNNKDLPAPIERTISKPKGSVRAPQVYVLPPPEEEMTKKQVTLTCMVTDFMPEDIYVEWTNNGKTELNYKNTEPVLDSDGSYFMYSKLRVEKKNWVERNSYSCSVVHEGLHNHHTTKSFSRTPGK

SEQ ID NO: 701 - protein, 214 aa, Homo sapiens
  REGION 1..214: note = Description of sequence: I23RB263
  REGION 1..214: note = Description of type of peptide: Light Chain
DIQMTQSPSSLSASVGDRVTITCRASQSISSYLNWYQQKPGKAPKLLIYAASSLQSGVPSRFSGSGSGTDFTLTISSLQPEDFATYYCQQPYSVPFTFGQGTKVEIKRADAAPTVSIFPPSSEQLTSGGASVVCFLNNFYPKDINVKWKIDGSERQNGVLNSWTDQDSKDSTYSMSSTLTLTKDEYERHNSYTCEATHKTSTSPIVKSFNRNEC

SEQ ID NO: 702 - protein, 447 aa, Homo sapiens
  REGION 1..447: note = Description of sequence: I23RB264
  REGION 1..447: note = Description of type of peptide: Heavy Chain
QVQLVQSGAEVKKPGSSVKVSCKASGGTFSSYAISWVRQAPGQGLEWMGGIIPIFGTANYAQKFQGRVTITADESTSTAYMELSSLRSEDTAVYYCARRSSPGFDYWGQGTLVTVSSAKTTAPSVYPLAPVCGDTTGSSVTLGCLVKGYFPEPVTLTWNSGSLSSGVHTFPAVLQSDLYTLSSSVTVTSSTWPSQSITCNVAHPASSTKVDKKIEPRGPTIKPCPPCKCPAPNLLGGPSVFIFPPKIKDVLMISLSPIVTCVVVDVSEDDPDVQISWFVNNVEVHTAQTQTHREDYNSTLRVVSALPIQHQDWMSGKEFKCKVNNKDLPAPIERTISKPKGSVRAPQVYVLPPPEEEMTKKQVTLTCMVTDFMPEDIYVEWTNNGKTELNYKNTEPVLDSDGSYFMYSKLRVEKKNWVERNSYSCSVVHEGLHNHHTTKSFSRTPGK

SEQ ID NO: 703 - protein, 214 aa, Homo sapiens
  REGION 1..214: note = Description of sequence: I23RB264
  REGION 1..214: note = Description of type of peptide: Light Chain
DIQMTQSPSSLSASVGDRVTITCRASQSIDNDLNWYQQKPGKAPKLLIYNASSLQSGVPSRFSGSGSGTDFTLTISSLQPEDFATYYCQQPYSIPLTFGQGTKVEIKRADAAPTVSIFPPSSEQLTSGGASVVCFLNNFYPKDINVKWKIDGSERQNGVLNSWTDQDSKDSTYSMSSTLTLTKDEYERHNSYTCEATHKTSTSPIVKSFNRNEC

SEQ ID NO: 704 - protein, 450 aa, Homo sapiens
  REGION 1..450: note = Description of sequence: I23RB265
  REGION 1..450: note = Description of type of peptide: Heavy Chain
QVQLVQSGAEVKKPGSSVKVSCKASGGTFSSYAISWVRQAPGQGLEWMGGIIPIFGTANYAQKFQGRVTITADESTSTAYMELSSLRSEDTAVYYCARGFVPTQGSLDYWGQGTLVTVSSAKTTAPSVYPLAPVCGDTTGSSVTLGCLVKGYFPEPVTLTWNSGSLSSGVHTFPAVLQSDLYTLSSSVTVTSSTWPSQSITCNVAHPASSTKVDKKIEPRGPTIKPCPPCKCPAPNLLGGPSVFIFPPKIKDVLMISLSPIVTCVVVDVSEDDPDVQISWFVNNVEVHTAQTQTHREDYNSTLRVVSALPIQHQDWMSGKEFKCKVNNKDLPAPIERTISKPKGSVRAPQVYVLPPPEEEMTKKQVTLTCMVTDFMPEDIYVEWTNNGKTELNYKNTEPVLDSDGSYFMYSKLRVEKKNWVERNSYSCSVVHEGLHNHHTTKSFSRTPGK

SEQ ID NO: 705 - protein, 214 aa, Homo sapiens
  REGION 1..214: note = Description of sequence: I23RB265
  REGION 1..214: note = Description of type of peptide: Light Chain
DIQMTQSPSSLSASVGDRVTITCRASQSISTWLNWYQQKPGKAPKLLIYKASSLQSGVPSRFSGSGSGTDFTLTISSLQPEDFATYYCQQYNSPPLTFGQGTKVEIKRADAAPTVSIFPPSSEQLTSGGASVVCFLNNFYPKDINVKWKIDGSERQNGVLNSWTDQDSKDSTYSMSSTLTLTKDEYERHNSYTCEATHKTSTSPIVKSFNRNEC

SEQ ID NO: 706 - protein, 453 aa, Homo sapiens
  REGION 1..453: note = Description of sequence: I23RB266
  REGION 1..453: note = Description of type of peptide: Heavy Chain
EVQLLESGGGLVQPGGSLRLSCAASGFTFSDYSMSWVRQAPGKGLEWVSVISGSGGSTYYADSVKGRFTISRDNSKNTLYLQMNSLRAEDTAVYYCAKHSMAGNSFLRFLDYWGQGTLVTVSSAKTTAPSVYPLAPVCGDTTGSSVTLGCLVKGYFPEPVTLTWNSGSLSSGVHTFPAVLQSDLYTLSSSVTVTSSTWPSQSITCNVAHPASSTKVDKKIEPRGPTIKPCPPCKCPAPNLLGGPSVFIFPPKIKDVLMISLSPIVTCVVVDVSEDDPDVQISWFVNNVEVHTAQTQTHREDYNSTLRVVSALPIQHQDWMSGKEFKCKVNNKDLPAPIERTISKPKGSVRAPQVYVLPPPEEEMTKKQVTLTCMVTDFMPEDIYVEWTNNGKTELNYKNTEPVLDSDGSYFMYSKLRVEKKNWVERNSYSCSVVHEGLHNHHTTKSFSRTPGK

SEQ ID NO: 707 - protein, 214 aa, Homo sapiens; identical to SEQ ID NO: 681
  REGION 1..214: note = Description of sequence: I23RB266
  REGION 1..214: note = Description of type of peptide: Light Chain

SEQ ID NO: 708 - protein, 449 aa, Homo sapiens
  REGION 1..449: note = Description of sequence: I23RB267
  REGION 1..449: note = Description of type of peptide: Heavy Chain
EVQLVQSGAEVKKPGESLKISCKGSGYSFTSYWIGWVRQMPGKGLEWMGIIYPGDSDTRYSPSFQGQVTISADKSISTAYLQWSSLKASDTAMYYCARVWYSSWDLDYWGQGTLVTVSSAKTTAPSVYPLAPVCGDTTGSSVTLGCLVKGYFPEPVTLTWNSGSLSSGVHTFPAVLQSDLYTLSSSVTVTSSTWPSQSITCNVAHPASSTKVDKKIEPRGPTIKPCPPCKCPAPNLLGGPSVFIFPPKIKDVLMISLSPIVTCVVVDVSEDDPDVQISWFVNNVEVHTAQTQTHREDYNSTLRVVSALPIQHQDWMSGKEFKCKVNNKDLPAPIERTISKPKGSVRAPQVYVLPPPEEEMTKKQVTLTCMVTDFMPEDIYVEWTNNGKTELNYKNTEPVLDSDGSYFMYSKLRVEKKNWVERNSYSCSVVHEGLHNHHTTKSFSRTPGK

SEQ ID NO: 709 - protein, 215 aa, Homo sapiens
  REGION 1..215: note = Description of sequence: I23RB267
  REGION 1..215: note = Description of type of peptide: Light Chain
EIVLTQSPGTLSLSPGERATLSCRASQSVSSSYLAWYQQKPGQAPRLLIYGASSRATGIPDRFSGSGSGTDFTLTISRLEPEDFAVYYCQQYGSSPLTFGQGTKVEIKRADAAPTVSIFPPSSEQLTSGGASVVCFLNNFYPKDINVKWKIDGSERQNGVLNSWTDQDSKDSTYSMSSTLTLTKDEYERHNSYTCEATHKTSTSPIVKSFNRNEC

SEQ ID NO: 710 - protein, 457 aa, Homo sapiens
  REGION 1..457: note = Description of sequence: I23RB268
  REGION 1..457: note = Description of type of peptide: Heavy Chain
QVQLVQSGAEVKKPGSSVKVSCKASGGTFSSYYIHWVRQAPGQGLEWMGGIIPIFGYANYAQKFQGRVTITADESTSTAYMELSSLRSEDTAVYYCARDPGSYGSVYYRRSYYFDYWGQGTLVTVSSAKTTAPSVYPLAPVCGDTTGSSVTLGCLVKGYFPEPVTLTWNSGSLSSGVHTFPAVLQSDLYTLSSSVTVTSSTWPSQSITCNVAHPASSTKVDKKIEPRGPTIKPCPPCKCPAPNLLGGPSVFIFPPKIKDVLMISLSPIVTCVVVDVSEDDPDVQISWFVNNVEVHTAQTQTHREDYNSTLRVVSALPIQHQDWMSGKEFKCKVNNKDLPAPIERTISKPKGSVRAPQVYVLPPPEEEMTKKQVTLTCMVTDFMPEDIYVEWTNNGKTELNYKNTEPVLDSDGSYFMYSKLRVEKKNWVERNSYSCSVVHEGLHNHHTTKSFSRTPGK

SEQ ID NO: 711 - protein, 214 aa, Homo sapiens; identical to SEQ ID NO: 673
  REGION 1..214: note = Description of sequence: I23RB268
  REGION 1..214: note = Description of type of peptide: Light Chain

SEQ ID NO: 712 - protein, 453 aa, Homo sapiens
  REGION 1..453: note = Description of sequence: I23RB269
  REGION 1..453: note = Description of type of peptide: Heavy Chain
QVQLVQSGAEVKKPGSSVKVSCKASGGTFSDASISWVRQAPGQGLEWMGTIIPISGNANYAQKFQGRVTITADESTSTAYMELSSLRSEDTAVYYCARDRYVWYYWDGYFDYWGQGTLVTVSSAKTTAPSVYPLAPVCGDTTGSSVTLGCLVKGYFPEPVTLTWNSGSLSSGVHTFPAVLQSDLYTLSSSVTVTSSTWPSQSITCNVAHPASSTKVDKKIEPRGPTIKPCPPCKCPAPNLLGGPSVFIFPPKIKDVLMISLSPIVTCVVVDVSEDDPDVQISWFVNNVEVHTAQTQTHREDYNSTLRVVSALPIQHQDWMSGKEFKCKVNNKDLPAPIERTISKPKGSVRAPQVYVLPPPEEEMTKKQVTLTCMVTDFMPEDIYVEWTNNGKTELNYKNTEPVLDSDGSYFMYSKLRVEKKNWVERNSYSCSVVHEGLHNHHTTKSFSRTPGK

SEQ ID NO: 713 - protein, 215 aa, Homo sapiens; identical to SEQ ID NO: 709
  REGION 1..215: note = Description of sequence: I23RB269
  REGION 1..215: note = Description of type of peptide: Light Chain

SEQ ID NO: 714 - protein, 458 aa, Homo sapiens
  REGION 1..458: note = Description of sequence: I23RB270
  REGION 1..458: note = Description of type of peptide: Heavy Chain
QVQLVQSGAEVKKPGSSVKVSCKASGGTFDSYAISWVRQAPGQGLEWMGGIIPISGYANYAQKFQGRVTITADESTSTAYMELSSLRSEDTAVYYCARDLSGGYLGLRTLYYYYFDYWGQGTLVTVSSAKTTAPSVYPLAPVCGDTTGSSVTLGCLVKGYFPEPVTLTWNSGSLSSGVHTFPAVLQSDLYTLSSSVTVTSSTWPSQSITCNVAHPASSTKVDKKIEPRGPTIKPCPPCKCPAPNLLGGPSVFIFPPKIKDVLMISLSPIVTCVVVDVSEDDPDVQISWFVNNVEVHTAQTQTHREDYNSTLRVVSALPIQHQDWMSGKEFKCKVNNKDLPAPIERTISKPKGSVRAPQVYVLPPPEEEMTKKQVTLTCMVTDFMPEDIYVEWTNNGKTELNYKNTEPVLDSDGSYFMYSKLRVEKKNWVERNSYSCSVVHEGLHNHHTTKSFSRTPGK

SEQ ID NO: 715 - protein, 214 aa, Homo sapiens; identical to SEQ ID NO: 673
  REGION 1..214: note = Description of sequence: I23RB270
  REGION 1..214: note = Description of type of peptide: Light Chain

SEQ ID NO: 716 - protein, 449 aa, Homo sapiens
  REGION 1..449: note = Description of sequence: I23RB271
  REGION 1..449: note = Description of type of peptide: Heavy Chain
EVQLLESGGGLVQPGGSLRLSCAASGFTFSSYAMSWVRQAPGKGLEWVSAISGSGGSTYYADSVKGRFTISRDNSKNTLYLQMNSLRAEDTAVYYCARDRGSAETFDYWGQGTLVTVSSAKTTAPSVYPLAPVCGDTTGSSVTLGCLVKGYFPEPVTLTWNSGSLSSGVHTFPAVLQSDLYTLSSSVTVTSSTWPSQSITCNVAHPASSTKVDKKIEPRGPTIKPCPPCKCPAPNLLGGPSVFIFPPKIKDVLMISLSPIVTCVVVDVSEDDPDVQISWFVNNVEVHTAQTQTHREDYNSTLRVVSALPIQHQDWMSGKEFKCKVNNKDLPAPIERTISKPKGSVRAPQVYVLPPPEEEMTKKQVTLTCMVTDFMPEDIYVEWTNNGKTELNYKNTEPVLDSDGSYFMYSKLRVEKKNWVERNSYSCSVVHEGLHNHHTTKSFSRTPGK

SEQ ID NO: 717 - protein, 214 aa, Homo sapiens; identical to SEQ ID NO: 681
  REGION 1..214: note = Description of sequence: I23RB271
  REGION 1..214: note = Description of type of peptide: Light Chain

SEQ ID NO: 718 - protein, 450 aa, Homo sapiens
  REGION 1..450: note = Description of sequence: I23RB272
  REGION 1..450: note = Description of type of peptide: Heavy Chain
EVQLLESGGGLVQPGGSLRLSCAASGFTFSSYAMSWVRQAPGKGLEWVSAISGSGGSTYYADSVKGRFTISRDNSKNTLYLQMNSLRAEDTAVYYCARDFGEPNGGFDYWGQGTLVTVSSAKTTAPSVYPLAPVCGDTTGSSVTLGCLVKGYFPEPVTLTWNSGSLSSGVHTFPAVLQSDLYTLSSSVTVTSSTWPSQSITCNVAHPASSTKVDKKIEPRGPTIKPCPPCKCPAPNLLGGPSVFIFPPKIKDVLMISLSPIVTCVVVDVSEDDPDVQISWFVNNVEVHTAQTQTHREDYNSTLRVVSALPIQHQDWMSGKEFKCKVNNKDLPAPIERTISKPKGSVRAPQVYVLPPPEEEMTKKQVTLTCMVTDFMPEDIYVEWTNNGKTELNYKNTEPVLDSDGSYFMYSKLRVEKKNWVERNSYSCSVVHEGLHNHHTTKSFSRTPGK

SEQ ID NO: 719 - protein, 215 aa, Homo sapiens; identical to SEQ ID NO: 709
  REGION 1..215: note = Description of sequence: I23RB272
  REGION 1..215: note = Description of type of peptide: Light Chain

SEQ ID NO: 720 - protein, 457 aa, Homo sapiens
  REGION 1..457: note = Description of sequence: I23RB273
  REGION 1..457: note = Description of type of peptide: Heavy Chain
EVQLLESGGGLVQPGGSLRLSCAASGFTFSSYAMSWVRQAPGKGLEWVSAISGSGGSTYYADSVKGRFTISRDNSKNTLYLQMNSLRAEDTAVYYCARDPSSYYYNGYLGSYAFDYWGQGTLVTVSSAKTTAPSVYPLAPVCGDTTGSSVTLGCLVKGYFPEPVTLTWNSGSLSSGVHTFPAVLQSDLYTLSSSVTVTSSTWPSQSITCNVAHPASSTKVDKKIEPRGPTIKPCPPCKCPAPNLLGGPSVFIFPPKIKDVLMISLSPIVTCVVVDVSEDDPDVQISWFVNNVEVHTAQTQTHREDYNSTLRVVSALPIQHQDWMSGKEFKCKVNNKDLPAPIERTISKPKGSVRAPQVYVLPPPEEEMTKKQVTLTCMVTDFMPEDIYVEWTNNGKTELNYKNTEPVLDSDGSYFMYSKLRVEKKNWVERNSYSCSVVHEGLHNHHTTKSFSRTPGK

SEQ ID NO: 721 - protein, 214 aa, Homo sapiens; identical to SEQ ID NO: 681
  REGION 1..214: note = Description of sequence: I23RB273
  REGION 1..214: note = Description of type of peptide: Light Chain

SEQ ID NO: 722 - protein, 452 aa, Homo sapiens
  REGION 1..452: note = Description of sequence: I23RB274
  REGION 1..452: note = Description of type of peptide: Heavy Chain
EVQLLESGGGLVQPGGSLRLSCAASGFTFSSYAMSWVRQAPGKGLEWVSAISGSGGSTYYADSVKGRFTISRDNSKNTLYLQMNSLRAEDTAVYYCAREDATDSSDYYFDYWGQGTLVTVSSAKTTAPSVYPLAPVCGDTTGSSVTLGCLVKGYFPEPVTLTWNSGSLSSGVHTFPAVLQSDLYTLSSSVTVTSSTWPSQSITCNVAHPASSTKVDKKIEPRGPTIKPCPPCKCPAPNLLGGPSVFIFPPKIKDVLMISLSPIVTCVVVDVSEDDPDVQISWFVNNVEVHTAQTQTHREDYNSTLRVVSALPIQHQDWMSGKEFKCKVNNKDLPAPIERTISKPKGSVRAPQVYVLPPPEEEMTKKQVTLTCMVTDFMPEDIYVEWTNNGKTELNYKNTEPVLDSDGSYFMYSKLRVEKKNWVERNSYSCSVVHEGLHNHHTTKSFSRTPGK

SEQ ID NO: 723 - protein, 214 aa, Homo sapiens; identical to SEQ ID NO: 681
  REGION 1..214: note = Description of sequence: I23RB274
  REGION 1..214: note = Description of type of peptide: Light Chain

SEQ ID NO: 724 - protein, 452 aa, Homo sapiens
  REGION 1..452: note = Description of sequence: I23RB275
  REGION 1..452: note = Description of type of peptide: Heavy Chain
EVQLLESGGGLVQPGGSLRLSCAASGFTFSDSGMSWVRQAPGKGLEWVSAIDGSGGTTYYADSVKGRFTISRDNSKNTLYLQMNSLRAEDTAVYYCARGSGGYVGYGGFDYWGQGTLVTVSSAKTTAPSVYPLAPVCGDTTGSSVTLGCLVKGYFPEPVTLTWNSGSLSSGVHTFPAVLQSDLYTLSSSVTVTSSTWPSQSITCNVAHPASSTKVDKKIEPRGPTIKPCPPCKCPAPNLLGGPSVFIFPPKIKDVLMISLSPIVTCVVVDVSEDDPDVQISWFVNNVEVHTAQTQTHREDYNSTLRVVSALPIQHQDWMSGKEFKCKVNNKDLPAPIERTISKPKGSVRAPQVYVLPPPEEEMTKKQVTLTCMVTDFMPEDIYVEWTNNGKTELNYKNTEPVLDSDGSYFMYSKLRVEKKNWVERNSYSCSVVHEGLHNHHTTKSFSRTPGK

SEQ ID NO: 725 - protein, 214 aa, Homo sapiens; identical to SEQ ID NO: 681
  REGION 1..214: note = Description of sequence: I23RB275
  REGION 1..214: note = Description of type of peptide: Light Chain

SEQ ID NO: 726 - protein, 458 aa, Homo sapiens
  REGION 1..458: note = Description of sequence: I23RB276
  REGION 1..458: note = Description of type of peptide: Heavy Chain
EVQLLESGGGLVQPGGSLRLSCAASGFTFSNYAMSWVRQAPGKGLEWVSAISGSGGSTYYADSVKGRFTISRDNSKNTLYLQMNSLRAEDTAVYYCARDGSYGYRGRRRRYYDYFDYWGQGTLVTVSSAKTTAPSVYPLAPVCGDTTGSSVTLGCLVKGYFPEPVTLTWNSGSLSSGVHTFPAVLQSDLYTLSSSVTVTSSTWPSQSITCNVAHPASSTKVDKKIEPRGPTIKPCPPCKCPAPNLLGGPSVFIFPPKIKDVLMISLSPIVTCVVVDVSEDDPDVQISWFVNNVEVHTAQTQTHREDYNSTLRVVSALPIQHQDWMSGKEFKCKVNNKDLPAPIERTISKPKGSVRAPQVYVLPPPEEEMTKKQVTLTCMVTDFMPEDIYVEWTNNGKTELNYKNTEPVLDSDGSYFMYSKLRVEKKNWVERNSYSCSVVHEGLHNHHTTKSFSRTPGK

SEQ ID NO: 727 - protein, 214 aa, Homo sapiens; identical to SEQ ID NO: 681
  REGION 1..214: note = Description of sequence: I23RB276
  REGION 1..214: note = Description of type of peptide: Light Chain

SEQ ID NO: 728 - protein, 448 aa, Homo sapiens
  REGION 1..448: note = Description of sequence: I23RB277
  REGION 1..448: note = Description of type of peptide: Heavy Chain
EVQLLESGGGLVQPGGSLRLSCAASGFTFSSYAMSWVRQAPGKGLEWVSAISGSGGSTYYADSVKGRFTISRDNSKNTLYLQMNSLRAEDTAVYYCARRRRYRYFDYWGQGTLVTVSSAKTTAPSVYPLAPVCGDTTGSSVTLGCLVKGYFPEPVTLTWNSGSLSSGVHTFPAVLQSDLYTLSSSVTVTSSTWPSQSITCNVAHPASSTKVDKKIEPRGPTIKPCPPCKCPAPNLLGGPSVFIFPPKIKDVLMISLSPIVTCVVVDVSEDDPDVQISWFVNNVEVHTAQTQTHREDYNSTLRVVSALPIQHQDWMSGKEFKCKVNNKDLPAPIERTISKPKGSVRAPQVYVLPPPEEEMTKKQVTLTCMVTDFMPEDIYVEWTNNGKTELNYKNTEPVLDSDGSYFMYSKLRVEKKNWVERNSYSCSVVHEGLHNHHTTKSFSRTPGK

SEQ ID NO: 729 - protein, 214 aa, Homo sapiens; identical to SEQ ID NO: 681
  REGION 1..214: note = Description of sequence: I23RB277
  REGION 1..214: note = Description of type of peptide: Light Chain

SEQ ID NO: 730 - protein, 451 aa, Homo sapiens
  REGION 1..451: note = Description of sequence: I23RB278
  REGION 1..451: note = Description of type of peptide: Heavy Chain
EVQLLESGGGLVQPGGSLRLSCAASGFTFSSYAMSWVRQAPGKGLEWVSAISGSGGSTYYADSVKGRFTISRDNSKNTLYLQMNSLRAEDTAVYYCVRGGSLGGGFYFDYWGQGTLVTVSSAKTTAPSVYPLAPVCGDTTGSSVTLGCLVKGYFPEPVTLTWNSGSLSSGVHTFPAVLQSDLYTLSSSVTVTSSTWPSQSITCNVAHPASSTKVDKKIEPRGPTIKPCPPCKCPAPNLLGGPSVFIFPPKIKDVLMISLSPIVTCVVVDVSEDDPDVQISWFVNNVEVHTAQTQTHREDYNSTLRVVSALPIQHQDWMSGKEFKCKVNNKDLPAPIERTISKPKGSVRAPQVYVLPPPEEEMTKKQVTLTCMVTDFMPEDIYVEWTNNGKTELNYKNTEPVLDSDGSYFMYSKLRVEKKNWVERNSYSCSVVHEGLHNHHTTKSFSRTPGK

SEQ ID NO: 731 - protein, 215 aa, Homo sapiens; identical to SEQ ID NO: 709
  REGION 1..215: note = Description of sequence: I23RB278
  REGION 1..215: note = Description of type of peptide: Light Chain

SEQ ID NO: 732 - protein, 453 aa, Homo sapiens
  REGION 1..453: note = Description of sequence: I23RB279
  REGION 1..453: note = Description of type of peptide: Heavy Chain
EVQLLESGGGLVQPGGSLRLSCAASGFTFDTYAMHWVRQAPGKGLEWVSWISGEGGSTEYADSVKGRFTISRDNSKNTLYLQMNSLRAEDTAVYYCARDLGAYNRPFYAFDYWGQGTLVTVSSAKTTAPSVYPLAPVCGDTTGSSVTLGCLVKGYFPEPVTLTWNSGSLSSGVHTFPAVLQSDLYTLSSSVTVTSSTWPSQSITCNVAHPASSTKVDKKIEPRGPTIKPCPPCKCPAPNLLGGPSVFIFPPKIKDVLMISLSPIVTCVVVDVSEDDPDVQISWFVNNVEVHTAQTQTHREDYNSTLRVVSALPIQHQDWMSGKEFKCKVNNKDLPAPIERTISKPKGSVRAPQVYVLPPPEEEMTKKQVTLTCMVTDFMPEDIYVEWTNNGKTELNYKNTEPVLDSDGSYFMYSKLRVEKKNWVERNSYSCSVVHEGLHNHHTTKSFSRTPGK

SEQ ID NO: 733 - protein, 214 aa, Homo sapiens; identical to SEQ ID NO: 681
  REGION 1..214: note = Description of sequence: I23RB279
  REGION 1..214: note = Description of type of peptide: Light Chain

SEQ ID NO: 734 - protein, 456 aa, Homo sapiens
  REGION 1..456: note = Description of sequence: I23RB280
  REGION 1..456: note = Description of type of peptide: Heavy Chain
EVQLLESGGGLVQPGGSLRLSCAASGFTFSNAAMHWVRQAPGKGLEWVSRIDGSGGYTEYADSVKGRFTISRDNSKNTLYLQMNSLRAEDTAVYYCARELYSYLGSSYYYGYFDYWGQGTLVTVSSAKTTAPSVYPLAPVCGDTTGSSVTLGCLVKGYFPEPVTLTWNSGSLSSGVHTFPAVLQSDLYTLSSSVTVTSSTWPSQSITCNVAHPASSTKVDKKIEPRGPTIKPCPPCKCPAPNLLGGPSVFIFPPKIKDVLMISLSPIVTCVVVDVSEDDPDVQISWFVNNVEVHTAQTQTHREDYNSTLRVVSALPIQHQDWMSGKEFKCKVNNKDLPAPIERTISKPKGSVRAPQVYVLPPPEEEMTKKQVTLTCMVTDFMPEDIYVEWTNNGKTELNYKNTEPVLDSDGSYFMYSKLRVEKKNWVERNSYSCSVVHEGLHNHHTTKSFSRTPGK

SEQ ID NO: 735 - protein, 215 aa, Homo sapiens; identical to SEQ ID NO: 709
  REGION 1..215: note = Description of sequence: I23RB280
  REGION 1..215: note = Description of type of peptide: Light Chain

SEQ ID NO: 736 - protein, 457 aa, Homo sapiens
  REGION 1..457: note = Description of sequence: I23RB281
  REGION 1..457: note = Description of type of peptide: Heavy Chain
EVQLLESGGGLVQPGGSLRLSCAASGFTFSSYAMSWVRQAPGKGLEWVSAISGSGGSTYYADSVKGRFTISRDNSKNTLYLQMNSLRAEDTAVYYCARGPYYSGTSGYRSGGGFDYWGQGTLVTVSSAKTTAPSVYPLAPVCGDTTGSSVTLGCLVKGYFPEPVTLTWNSGSLSSGVHTFPAVLQSDLYTLSSSVTVTSSTWPSQSITCNVAHPASSTKVDKKIEPRGPTIKPCPPCKCPAPNLLGGPSVFIFPPKIKDVLMISLSPIVTCVVVDVSEDDPDVQISWFVNNVEVHTAQTQTHREDYNSTLRVVSALPIQHQDWMSGKEFKCKVNNKDLPAPIERTISKPKGSVRAPQVYVLPPPEEEMTKKQVTLTCMVTDFMPEDIYVEWTNNGKTELNYKNTEPVLDSDGSYFMYSKLRVEKKNWVERNSYSCSVVHEGLHNHHTTKSFSRTPGK

SEQ ID NO: 737 - protein, 214 aa, Homo sapiens; identical to SEQ ID NO: 681
  REGION 1..214: note = Description of sequence: I23RB281
  REGION 1..214: note = Description of type of peptide: Light Chain

SEQ ID NO: 738 - protein, 456 aa, Homo sapiens
  REGION 1..456: note = Description of sequence: I23RB282
  REGION 1..456: note = Description of type of peptide: Heavy Chain
EVQLLESGGGLVQPGGSLRLSCAASGFTFSNDAMNWVRQAPGKGLEWVSAIDGNGGSTNYADSVKGRFTISRDNSKNTLYLQMNSLRAEDTAVYYCARDLGGYYGRRRRYYGMDVWGQGTLVTVSSAKTTAPSVYPLAPVCGDTTGSSVTLGCLVKGYFPEPVTLTWNSGSLSSGVHTFPAVLQSDLYTLSSSVTVTSSTWPSQSITCNVAHPASSTKVDKKIEPRGPTIKPCPPCKCPAPNLLGGPSVFIFPPKIKDVLMISLSPIVTCVVVDVSEDDPDVQISWFVNNVEVHTAQTQTHREDYNSTLRVVSALPIQHQDWMSGKEFKCKVNNKDLPAPIERTISKPKGSVRAPQVYVLPPPEEEMTKKQVTLTCMVTDFMPEDIYVEWTNNGKTELNYKNTEPVLDSDGSYFMYSKLRVEKKNWVERNSYSCSVVHEGLHNHHTTKSFSRTPGK

SEQ ID NO: 739 - protein, 214 aa, Homo sapiens; identical to SEQ ID NO: 681
  REGION 1..214: note = Description of sequence: I23RB282
  REGION 1..214: note = Description of type of peptide: Light Chain

SEQ ID NO: 740 - protein, 451 aa, Homo sapiens
  REGION 1..451: note = Description of sequence: I23RB283
  REGION 1..451: note = Description of type of peptide: Heavy Chain
EVQLLESGGGLVQPGGSLRLSCAAIGFTFSSSAMHWVRQAPGKGLEWVSAIDGEGGSTYYADSVKGRFTISRDNSKNTLYLQMNSLRAEDTAVYYCAREVSSYGRYGFGYWGQGTLVTVSSAKTTAPSVYPLAPVCGDTTGSSVTLGCLVKGYFPEPVTLTWNSGSLSSGVHTFPAVLQSDLYTLSSSVTVTSSTWPSQSITCNVAHPASSTKVDKKIEPRGPTIKPCPPCKCPAPNLLGGPSVFIFPPKIKDVLMISLSPIVTCVVVDVSEDDPDVQISWFVNNVEVHTAQTQTHREDYNSTLRVVSALPIQHQDWMSGKEFKCKVNNKDLPAPIERTISKPKGSVRAPQVYVLPPPEEEMTKKQVTLTCMVTDFMPEDIYVEWTNNGKTELNYKNTEPVLDSDGSYFMYSKLRVEKKNWVERNSYSCSVVHEGLHNHHTTKSFSRTPGK

SEQ ID NO: 741 - protein, 215 aa, Homo sapiens; identical to SEQ ID NO: 709
  REGION 1..215: note = Description of sequence: I23RB283
  REGION 1..215: note = Description of type of peptide: Light Chain

SEQ ID NO: 742 - protein, 452 aa, Homo sapiens
  REGION 1..452: note = Description of sequence: I23RB284
  REGION 1..452: note = Description of type of peptide: Heavy Chain
EVQLLESGGGLVQPGGSLRLSCAASGFTFSSYAMSWVRQAPGKGLEWVSAISGSGGSTYYADSVKGRFTISRDNSKNTLYLQMNSLRAEDTAVYYCARGLAGNSSGGGFDYWGQGTLVTVSSAKTTAPSVYPLAPVCGDTTGSSVTLGCLVKGYFPEPVTLTWNSGSLSSGVHTFPAVLQSDLYTLSSSVTVTSSTWPSQSITCNVAHPASSTKVDKKIEPRGPTIKPCPPCKCPAPNLLGGPSVFIFPPKIKDVLMISLSPIVTCVVVDVSEDDPDVQISWFVNNVEVHTAQTQTHREDYNSTLRVVSALPIQHQDWMSGKEFKCKVNNKDLPAPIERTISKPKGSVRAPQVYVLPPPEEEMTKKQVTLTCMVTDFMPEDIYVEWTNNGKTELNYKNTEPVLDSDGSYFMYSKLRVEKKNWVERNSYSCSVVHEGLHNHHTTKSFSRTPGK

SEQ ID NO: 743 - protein, 214 aa, Homo sapiens; identical to SEQ ID NO: 681
  REGION 1..214: note = Description of sequence: I23RB284
  REGION 1..214: note = Description of type of peptide: Light Chain

SEQ ID NO: 744 - protein, 455 aa, Homo sapiens
  REGION 1..455: note = Description of sequence: I23RB285
  REGION 1..455: note = Description of type of peptide: Heavy Chain
EVQLLESGGGLVQPGGSLRLSCAASGFTFDDYAMNWVRQAPGKGLEWVSAIAGNGGSTEYADSVKGRFTISRDNSKNTLYLQMNSLRAEDTAVYYCARDGGYPLTAVTGIYFDYWGQGTLVTVSSAKTTAPSVYPLAPVCGDTTGSSVTLGCLVKGYFPEPVTLTWNSGSLSSGVHTFPAVLQSDLYTLSSSVTVTSSTWPSQSITCNVAHPASSTKVDKKIEPRGPTIKPCPPCKCPAPNLLGGPSVFIFPPKIKDVLMISLSPIVTCVVVDVSEDDPDVQISWFVNNVEVHTAQTQTHREDYNSTLRVVSALPIQHQDWMSGKEFKCKVNNKDLPAPIERTISKPKGSVRAPQVYVLPPPEEEMTKKQVTLTCMVTDFMPEDIYVEWTNNGKTELNYKNTEPVLDSDGSYFMYSKLRVEKKNWVERNSYSCSVVHEGLHNHHTTKSFSRTPGK

SEQ ID NO: 745 - protein, 214 aa, Homo sapiens; identical to SEQ ID NO: 681
  REGION 1..214: note = Description of sequence: I23RB285
  REGION 1..214: note = Description of type of peptide: Light Chain

SEQ ID NO: 746 - protein, 448 aa, Homo sapiens
  REGION 1..448: note = Description of sequence: I23RB286
  REGION 1..448: note = Description of type of peptide: Heavy Chain
EVQLLESGGGLVQPGGSLRLSCAASGFTFSDAGMSWVRQAPGKGLEWVSAISGNGGSTNYADSVKGRFTISRDNSKNTLYLQMNSLRAEDTAVYYCARRRRRASFDYWGQGTLVTVSSAKTTAPSVYPLAPVCGDTTGSSVTLGCLVKGYFPEPVTLTWNSGSLSSGVHTFPAVLQSDLYTLSSSVTVTSSTWPSQSITCNVAHPASSTKVDKKIEPRGPTIKPCPPCKCPAPNLLGGPSVFIFPPKIKDVLMISLSPIVTCVVVDVSEDDPDVQISWFVNNVEVHTAQTQTHREDYNSTLRVVSALPIQHQDWMSGKEFKCKVNNKDLPAPIERTISKPKGSVRAPQVYVLPPPEEEMTKKQVTLTCMVTDFMPEDIYVEWTNNGKTELNYKNTEPVLDSDGSYFMYSKLRVEKKNWVERNSYSCSVVHEGLHNHHTTKSFSRTPGK

SEQ ID NO: 747 - protein, 214 aa, Homo sapiens; identical to SEQ ID NO: 681
  REGION 1..214: note = Description of sequence: I23RB286
  REGION 1..214: note = Description of type of peptide: Light Chain

SEQ ID NO: 748 - protein, 456 aa, Homo sapiens
  REGION 1..456: note = Description of sequence: I23RB287
  REGION 1..456: note = Description of type of peptide: Heavy Chain
EVQLVQSGAEVKKPGESLKISCKGSGYSFTDAAIHWVRQMPGKGLEWMGTIDPGDSTTRYSPSFQGQVTISADKSISTAYLQWSSLKASDTAVYYCARDLYYTLEYNWYYDAFDYWGQGTLVTVSSAKTTAPSVYPLAPVCGDTTGSSVTLGCLVKGYFPEPVTLTWNSGSLSSGVHTFPAVLQSDLYTLSSSVTVTSSTWPSQSITCNVAHPASSTKVDKKIEPRGPTIKPCPPCKCPAPNLLGGPSVFIFPPKIKDVLMISLSPIVTCVVVDVSEDDPDVQISWFVNNVEVHTAQTQTHREDYNSTLRVVSALPIQHQDWMSGKEFKCKVNNKDLPAPIERTISKPKGSVRAPQVYVLPPPEEEMTKKQVTLTCMVTDFMPEDIYVEWTNNGKTELNYKNTEPVLDSDGSYFMYSKLRVEKKNWVERNSYSCSVVHEGLHNHHTTKSFSRTPGK

SEQ ID NO: 749 - protein, 215 aa, Homo sapiens; identical to SEQ ID NO: 709
  REGION 1..215: note = Description of sequence: I23RB287
  REGION 1..215: note = Description of type of peptide: Light Chain

SEQ ID NO: 750 - protein, 457 aa, Homo sapiens
  REGION 1..457: note = Description of sequence: I23RB288
  REGION 1..457: note = Description of type of peptide: Heavy Chain
EVQLVQSGAEVKKPGESLKISCKGSGYSFKSDWISWVRQMPGKGLEWMGWIYPGDSRTYYSPSFQGQVTISADKSISTAYLQWSSLKASDTAVYYCARDSSYGTGNRGGRSGAFDYWGQGTLVTVSSAKTTAPSVYPLAPVCGDTTGSSVTLGCLVKGYFPEPVTLTWNSGSLSSGVHTFPAVLQSDLYTLSSSVTVTSSTWPSQSITCNVAHPASSTKVDKKIEPRGPTIKPCPPCKCPAPNLLGGPSVFIFPPKIKDVLMISLSPIVTCVVVDVSEDDPDVQISWFVNNVEVHTAQTQTHREDYNSTLRVVSALPIQHQDWMSGKEFKCKVNNKDLPAPIERTISKPKGSVRAPQVYVLPPPEEEMTKKQVTLTCMVTDFMPEDIYVEWTNNGKTELNYKNTEPVLDSDGSYFMYSKLRVEKKNWVERNSYSCSVVHEGLHNHHTTKSFSRTPGK

SEQ ID NO: 751 - protein, 215 aa, Homo sapiens; identical to SEQ ID NO: 709
  REGION 1..215: note = Description of sequence: I23RB288
  REGION 1..215: note = Description of type of peptide: Light Chain

SEQ ID NO: 752 - protein, 448 aa, Homo sapiens
  REGION 1..448: note = Description of sequence: I23RB289
  REGION 1..448: note = Description of type of peptide: Heavy Chain
EVQLVQSGAEVKKPGESLKISCKGSGYSFDSAGINWVRQMPGKGLEWMGNIYPGDSDTRYSPSFQGQVTISADKSISTAYLQWSSLKASDTAVYYCARGGGSLGFDYWGQGTLVTVSSAKTTAPSVYPLAPVCGDTTGSSVTLGCLVKGYFPEPVTLTWNSGSLSSGVHTFPAVLQSDLYTLSSSVTVTSSTWPSQSITCNVAHPASSTKVDKKIEPRGPTIKPCPPCKCPAPNLLGGPSVFIFPPKIKDVLMISLSPIVTCVVVDVSEDDPDVQISWFVNNVEVHTAQTQTHREDYNSTLRVVSALPIQHQDWMSGKEFKCKVNNKDLPAPIERTISKPKGSVRAPQVYVLPPPEEEMTKKQVTLTCMVTDFMPEDIYVEWTNNGKTELNYKNTEPVLDSDGSYFMYSKLRVEKKNWVERNSYSCSVVHEGLHNHHTTKSFSRTPGK

SEQ ID NO: 753 - protein, 214 aa, Homo sapiens; identical to SEQ ID NO: 681
  REGION 1..214: note = Description of sequence: I23RB289
  REGION 1..214: note = Description of type of peptide: Light Chain

SEQ ID NO: 754 - protein, 457 aa, Homo sapiens
  REGION 1..457: note = Description of sequence: I23RB290
  REGION 1..457: note = Description of type of peptide: Heavy Chain
EVQLVQSGAEVKKPGESLKISCKGSGYSFKNDGIHWVRQMPGKGLEWMGWIAPGESTTGYSPSFQGQVTISADKSISTAYLQWSSLKASDTAVYYCARDLGGYGSASGRRSDYFDYWGQGTLVTVSSAKTTAPSVYPLAPVCGDTTGSSVTLGCLVKGYFPEPVTLTWNSGSLSSGVHTFPAVLQSDLYTLSSSVTVTSSTWPSQSITCNVAHPASSTKVDKKIEPRGPTIKPCPPCKCPAPNLLGGPSVFIFPPKIKDVLMISLSPIVTCVVVDVSEDDPDVQISWFVNNVEVHTAQTQTHREDYNSTLRVVSALPIQHQDWMSGKEFKCKVNNKDLPAPIERTISKPKGSVRAPQVYVLPPPEEEMTKKQVTLTCMVTDFMPEDIYVEWTNNGKTELNYKNTEPVLDSDGSYFMYSKLRVEKKNWVERNSYSCSVVHEGLHNHHTTKSFSRTPGK

SEQ ID NO: 755 - protein, 214 aa, Homo sapiens; identical to SEQ ID NO: 681
  REGION 1..214: note = Description of sequence: I23RB290
  REGION 1..214: note = Description of type of peptide: Light Chain

SEQ ID NO: 756 - protein, 449 aa, Homo sapiens
  REGION 1..449: note = Description of sequence: I23RB291
  REGION 1..449: note = Description of type of peptide: Heavy Chain
EVQLVQSGAEVKKPGESLKISCKGSGYSFTSYYISWVRQMPGKGLEWMGNIYPGDSRTRYSPSFQGQVTISADKSISTAYLQWSSLKASDTAVYYCARDRYYGIPFDYWGQGTLVTVSSAKTTAPSVYPLAPVCGDTTGSSVTLGCLVKGYFPEPVTLTWNSGSLSSGVHTFPAVLQSDLYTLSSSVTVTSSTWPSQSITCNVAHPASSTKVDKKIEPRGPTIKPCPPCKCPAPNLLGGPSVFIFPPKIKDVLMISLSPIVTCVVVDVSEDDPDVQISWFVNNVEVHTAQTQTHREDYNSTLRVVSALPIQHQDWMSGKEFKCKVNNKDLPAPIERTISKPKGSVRAPQVYVLPPPEEEMTKKQVTLTCMVTDFMPEDIYVEWTNNGKTELNYKNTEPVLDSDGSYFMYSKLRVEKKNWVERNSYSCSVVHEGLHNHHTTKSFSRTPGK

SEQ ID NO: 757 - protein, 214 aa, Homo sapiens; identical to SEQ ID NO: 673
  REGION 1..214: note = Description of sequence: I23RB291
  REGION 1..214: note = Description of type of peptide: Light Chain

SEQ ID NO: 758 - protein, 457 aa, Homo sapiens
  REGION 1..457: note = Description of sequence: I23RB292
  REGION 1..457: note = Description of type of peptide: Heavy Chain
EVQLVQSGAEVKKPGESLKISCKGSGYSFDTDYINWVRQMPGKGLEWMGYILPGESDTRYSPSFQGQVTISADKSISTAYLQWSSLKASDTAVYYCARGGGYGLVNRRRRSYAFDYWGQGTLVTVSSAKTTAPSVYPLAPVCGDTTGSSVTLGCLVKGYFPEPVTLTWNSGSLSSGVHTFPAVLQSDLYTLSSSVTVTSSTWPSQSITCNVAHPASSTKVDKKIEPRGPTIKPCPPCKCPAPNLLGGPSVFIFPPKIKDVLMISLSPIVTCVVVDVSEDDPDVQISWFVNNVEVHTAQTQTHREDYNSTLRVVSALPIQHQDWMSGKEFKCKVNNKDLPAPIERTISKPKGSVRAPQVYVLPPPEEEMTKKQVTLTCMVTDFMPEDIYVEWTNNGKTELNYKNTEPVLDSDGSYFMYSKLRVEKKNWVERNSYSCSVVHEGLHNHHTTKSFSRTPGK

SEQ ID NO: 759 - protein, 214 aa, Homo sapiens; identical to SEQ ID NO: 681
  REGION 1..214: note = Description of sequence: I23RB292
  REGION 1..214: note = Description of type of peptide: Light Chain

SEQ ID NO: 760 - protein, 447 aa, Homo sapiens
  REGION 1..447: note = Description of sequence: I23RB313
  REGION 1..447: note = Description of type of peptide: Heavy Chain
QVQLVQSGAEVKKPGSSVKVSCKASGGTFSSYGISWVRQAPGQGLEWMGWISAIFGTTNYAQKFQGRVTITADESTSTAYMELSSLRSEDTAVYYCARGTVPGFDYWGQGTLVTVSSAKTTAPSVYPLAPVCGDTTGSSVTLGCLVKGYFPEPVTLTWNSGSLSSGVHTFPAVLQSDLYTLSSSVTVTSSTWPSQSITCNVAHPASSTKVDKKIEPRGPTIKPCPPCKCPAPNLLGGPSVFIFPPKIKDVLMISLSPIVTCVVVDVSEDDPDVQISWFVNNVEVHTAQTQTHREDYNSTLRVVSALPIQHQDWMSGKEFKCKVNNKDLPAPIERTISKPKGSVRAPQVYVLPPPEEEMTKKQVTLTCMVTDFMPEDIYVEWTNNGKTELNYKNTEPVLDSDGSYFMYSKLRVEKKNWVERNSYSCSVVHEGLHNHHTTKSFSRTPGK

SEQ ID NO: 761 - protein, 214 aa, Homo sapiens
  REGION 1..214: note = Description of sequence: I23RB313
  REGION 1..214: note = Description of type of peptide: Light Chain
DIQMTQSPSSLSASVGDRVTITCRASQSIGEDLNWYQQKPGKAPKLLIYAASSLQSGVPSRFSGSGSGTDFTLTISSLQPEDFATYYCQQSYSTPLTFGQGTKVEIKRADAAPTVSIFPPSSEQLTSGGASVVCFLNNFYPKDINVKWKIDGSERQNGVLNSWTDQDSKDSTYSMSSTLTLTKDEYERHNSYTCEATHKTSTSPIVKSFNRNEC

SEQ ID NO: 762 - protein, 447 aa, Homo sapiens
  REGION 1..447: note = Description of sequence: I23RB314
  REGION 1..447: note = Description of type of peptide: Heavy Chain
QVQLVQSGAEVKKPGSSVKVSCKASGGTFSSYGISWVRQAPGQGLEWMGWISPIFGTANYAQKFQGRVTITADESTSTAYMELSSLRSEDTAVYYCARMMMQGFDYWGQGTLVTVSSAKTTAPSVYPLAPVCGDTTGSSVTLGCLVKGYFPEPVTLTWNSGSLSSGVHTFPAVLQSDLYTLSSSVTVTSSTWPSQSITCNVAHPASSTKVDKKIEPRGPTIKPCPPCKCPAPNLLGGPSVFIFPPKIKDVLMISLSPIVTCVVVDVSEDDPDVQISWFVNNVEVHTAQTQTHREDYNSTLRVVSALPIQHQDWMSGKEFKCKVNNKDLPAPIERTISKPKGSVRAPQVYVLPPPEEEMTKKQVTLTCMVTDFMPEDIYVEWTNNGKTELNYKNTEPVLDSDGSYFMYSKLRVEKKNWVERNSYSCSVVHEGLHNHHTTKSFSRTPGK

SEQ ID NO: 763 - protein, 214 aa, Homo sapiens
  REGION 1..214: note = Description of sequence: I23RB314
  REGION 1..214: note = Description of type of peptide: Light Chain
DIQMTQSPSSLSASVGDRVTITCRASQSISEDLNWYQQKPGKAPKLLIYAASSLQSGVPSRFSGSGSGTDFTLTISSLQPEDFATYYCQQSYSTPLTFGQGTKVEIKRADAAPTVSIFPPSSEQLTSGGASVVCFLNNFYPKDINVKWKIDGSERQNGVLNSWTDQDSKDSTYSMSSTLTLTKDEYERHNSYTCEATHKTSTSPIVKSFNRNEC

SEQ ID NO: 764 - protein, 449 aa, Homo sapiens
  REGION 1..449: note = Description of sequence: I23RB315
  REGION 1..449: note = Description of type of peptide: Heavy Chain
QVQLVQSGAEVKKPGSSVKVSCKASGDTFSSYAISWVRQAPGQGLEWMGWISAIFGNANYAQKFQGRVTITADESTSTAYMELSSLRSEDTAVYYCARGAGWTLLLDYWGQGTLVTVSSAKTTAPSVYPLAPVCGDTTGSSVTLGCLVKGYFPEPVTLTWNSGSLSSGVHTFPAVLQSDLYTLSSSVTVTSSTWPSQSITCNVAHPASSTKVDKKIEPRGPTIKPCPPCKCPAPNLLGGPSVFIFPPKIKDVLMISLSPIVTCVVVDVSEDDPDVQISWFVNNVEVHTAQTQTHREDYNSTLRVVSALPIQHQDWMSGKEFKCKVNNKDLPAPIERTISKPKGSVRAPQVYVLPPPEEEMTKKQVTLTCMVTDFMPEDIYVEWTNNGKTELNYKNTEPVLDSDGSYFMYSKLRVEKKNWVERNSYSCSVVHEGLHNHHTTKSFSRTPGK

SEQ ID NO: 765 - protein, 214 aa, Homo sapiens
  REGION 1..214: note = Description of sequence: I23RB315
  REGION 1..214: note = Description of type of peptide: Light Chain
EIVLTQSPATLSLSPGERATLSCRASQSVRKWLAWYQQKPGQAPRLLIYAASNRATGIPARFSGSGSGTDFTLTISSLEPEDFAVYYCQQYNNAPLTFGQGTKVEIKRADAAPTVSIFPPSSEQLTSGGASVVCFLNNFYPKDINVKWKIDGSERQNGVLNSWTDQDSKDSTYSMSSTLTLTKDEYERHNSYTCEATHKTSTSPIVKSFNRNEC

SEQ ID NO: 766 - protein, 447 aa, Homo sapiens
  REGION 1..447: note = Description of sequence: I23RB316
  REGION 1..447: note = Description of type of peptide: Heavy Chain
QVQLVQSGAEVKKPGSSVKVSCKASGGTFSSYGISWVRQAPGQGLEWMGWIIPIFGTTNYAQKFQGRVTITADESTSTAYMELSSLRSEDTAVYYCARMMMQSLDYWGQGTLVTVSSAKTTAPSVYPLAPVCGDTTGSSVTLGCLVKGYFPEPVTLTWNSGSLSSGVHTFPAVLQSDLYTLSSSVTVTSSTWPSQSITCNVAHPASSTKVDKKIEPRGPTIKPCPPCKCPAPNLLGGPSVFIFPPKIKDVLMISLSPIVTCVVVDVSEDDPDVQISWFVNNVEVHTAQTQTHREDYNSTLRVVSALPIQHQDWMSGKEFKCKVNNKDLPAPIERTISKPKGSVRAPQVYVLPPPEEEMTKKQVTLTCMVTDFMPEDIYVEWTNNGKTELNYKNTEPVLDSDGSYFMYSKLRVEKKNWVERNSYSCSVVHEGLHNHHTTKSFSRTPGK

SEQ ID NO: 767 - protein, 214 aa, Homo sapiens; identical to SEQ ID NO: 693
  REGION 1..214: note = Description of sequence: I23RB316
  REGION 1..214: note = Description of type of peptide: Light Chain

SEQ ID NO: 768 - protein, 451 aa, Homo sapiens
  REGION 1..451: note = Description of sequence: I23RB317
  REGION 1..451: note = Description of type of peptide: Heavy Chain
QVQLVQSGAEVKKPGSSVKVSCKASGGTFSSYAISWVRQAPGQGLEWMGGIIPIFGTANYAQKFQGRVTITADESTSTAYMELSSLRSEDTAVYYCARGNGVNYHSELDYWGQGTLVTVSSAKTTAPSVYPLAPVCGDTTGSSVTLGCLVKGYFPEPVTLTWNSGSLSSGVHTFPAVLQSDLYTLSSSVTVTSSTWPSQSITCNVAHPASSTKVDKKIEPRGPTIKPCPPCKCPAPNLLGGPSVFIFPPKIKDVLMISLSPIVTCVVVDVSEDDPDVQISWFVNNVEVHTAQTQTHREDYNSTLRVVSALPIQHQDWMSGKEFKCKVNNKDLPAPIERTISKPKGSVRAPQVYVLPPPEEEMTKKQVTLTCMVTDFMPEDIYVEWTNNGKTELNYKNTEPVLDSDGSYFMYSKLRVEKKNWVERNSYSCSVVHEGLHNHHTTKSFSRTPGK

SEQ ID NO: 769 - protein, 214 aa, Homo sapiens
  REGION 1..214: note = Description of sequence: I23RB317
  REGION 1..214: note = Description of type of peptide: Light Chain
EIVLTQSPATLSLSPGERATLSCRASQSVDSFLAWYQQKPGQAPRLLIYTASNRATGIPARFSGSGSGTDFTLTISSLEPEDFAVYYCQQGNSAPFTFGQGTKVEIKRADAAPTVSIFPPSSEQLTSGGASVVCFLNNFYPKDINVKWKIDGSERQNGVLNSWTDQDSKDSTYSMSSTLTLTKDEYERHNSYTCEATHKTSTSPIVKSFNRNEC

SEQ ID NO: 770 - protein, 450 aa, Homo sapiens
  REGION 1..450: note = Description of sequence: I23RB318
  REGION 1..450: note = Description of type of peptide: Heavy Chain
QVQLVQSGAEVKKPGSSVKVSCKASGGTFSSYAISWVRQAPGQGLEWMGGIIPIFGTANYAQKFQGRVTITADESTSTAYMELSSLRSEDTAVYYCARVRARHRGSFDYWGQGTLVTVSSAKTTAPSVYPLAPVCGDTTGSSVTLGCLVKGYFPEPVTLTWNSGSLSSGVHTFPAVLQSDLYTLSSSVTVTSSTWPSQSITCNVAHPASSTKVDKKIEPRGPTIKPCPPCKCPAPNLLGGPSVFIFPPKIKDVLMISLSPIVTCVVVDVSEDDPDVQISWFVNNVEVHTAQTQTHREDYNSTLRVVSALPIQHQDWMSGKEFKCKVNNKDLPAPIERTISKPKGSVRAPQVYVLPPPEEEMTKKQVTLTCMVTDFMPEDIYVEWTNNGKTELNYKNTEPVLDSDGSYFMYSKLRVEKKNWVERNSYSCSVVHEGLHNHHTTKSFSRTPGK

SEQ ID NO: 771 - protein, 214 aa, Homo sapiens
  REGION 1..214: note = Description of sequence: I23RB318
  REGION 1..214: note = Description of type of peptide: Light Chain
DIQMTQSPSSLSASVGDRVTITCRASQSIDRWLNWYQQKPGKAPKLLIYYASSLQSGVPSRFSGSGSGTDFTLTISSLQPEDFATYYCQQSYSTPLTFGQGTKVEIKRADAAPTVSIFPPSSEQLTSGGASVVCFLNNFYPKDINVKWKIDGSERQNGVLNSWTDQDSKDSTYSMSSTLTLTKDEYERHNSYTCEATHKTSTSPIVKSFNRNEC

SEQ ID NO: 772 - protein, 447 aa, Homo sapiens
  REGION 1..447: note = Description of sequence: I23RB319
  REGION 1..447: note = Description of type of peptide: Heavy Chain
QVQLVQSGAEVKKPGSSVKVSCKASGGTFSSYGISWVRQAPGQGLEWMGWISAIFGTTNYAQKFQGRVTITADESTSTAYMELSSLRSEDTALYYCARPLKQAFDYWGQGTLVTVSSAKTTAPSVYPLAPVCGDTTGSSVTLGCLVKGYFPEPVTLTWNSGSLSSGVHTFPAVLQSDLYTLSSSVTVTSSTWPSQSITCNVAHPASSTKVDKKIEPRGPTIKPCPPCKCPAPNLLGGPSVFIFPPKIKDVLMISLSPIVTCVVVDVSEDDPDVQISWFVNNVEVHTAQTQTHREDYNSTLRVVSALPIQHQDWMSGKEFKCKVNNKDLPAPIERTISKPKGSVRAPQVYVLPPPEEEMTKKQVTLTCMVTDFMPEDIYVEWTNNGKTELNYKNTEPVLDSDGSYFMYSKLRVEKKNWVERNSYSCSVVHEGLHNHHTTKSFSRTPGK

SEQ ID NO: 773 - protein, 214 aa, Homo sapiens
  REGION 1..214: note = Description of sequence: I23RB319
  REGION 1..214: note = Description of type of peptide: Light Chain
DIQMTQSPSSLSASVGDRVTITCRASQSITDDLNWYQQKPGKAPKLLIYAASSLQSGVPSRFSGSGSGTDFTLTISSLQPEDFATYYCQQSYSTPLTFGQGTKVEIKRADAAPTVSIFPPSSEQLTSGGASVVCFLNNFYPKDINVKWKIDGSERQNGVLNSWTDQDSKDSTYSMSSTLTLTKDEYERHNSYTCEATHKTSTSPIVKSFNRNEC

SEQ ID NO: 774 - protein, 448 aa, Homo sapiens
  REGION 1..448: note = Description of sequence: I23RB320
  REGION 1..448: note = Description of type of peptide: Heavy Chain
QVQLVQSGAEVKKPGSSVKVSCKASGGTFSSYGISWVRQAPGQGLEWMGWISAIFGTTNYAQKFQGRVTITADESTSTAYMELSSLRSEDTAVYYCARNGTGNSFDYWGQGTLVTVSSAKTTAPSVYPLAPVCGDTTGSSVTLGCLVKGYFPEPVTLTWNSGSLSSGVHTFPAVLQSDLYTLSSSVTVTSSTWPSQSITCNVAHPASSTKVDKKIEPRGPTIKPCPPCKCPAPNLLGGPSVFIFPPKIKDVLMISLSPIVTCVVVDVSEDDPDVQISWFVNNVEVHTAQTQTHREDYNSTLRVVSALPIQHQDWMSGKEFKCKVNNKDLPAPIERTISKPKGSVRAPQVYVLPPPEEEMTKKQVTLTCMVTDFMPEDIYVEWTNNGKTELNYKNTEPVLDSDGSYFMYSKLRVEKKNWVERNSYSCSVVHEGLHNHHTTKSFSRTPGK

SEQ ID NO: 775 - protein, 214 aa, Homo sapiens
  REGION 1..214: note = Description of sequence: I23RB320
  REGION 1..214: note = Description of type of peptide: Light Chain
DIQMTQSPSSLSASVGDRVTITCRASQSITSDLNWYQQKPGKAPKLLIYAASSLQSGVPSRFSGSGSGTDFTLTISSLQPEDFATYYCQQSYSTPLTFGQGTKVEIKRADAAPTVSIFPPSSEQLTSGGASVVCFLNNFYPKDINVKWKIDGSERQNGVLNSWTDQDSKDSTYSMSSTLTLTKDEYERHNSYTCEATHKTSTSPIVKSFNRNEC

SEQ ID NO: 776 - protein, 447 aa, Homo sapiens
  REGION 1..447: note = Description of sequence: I23RB321
  REGION 1..447: note = Description of type of peptide: Heavy Chain
QVQLVQSGAEVKKPGSSVKVSCKASGGTFSSYGISWVRQAPGQGLEWMGWISAIFGTTNYAQKFQGRVTITADESTSTAYMELSSLRSEDTAVYYCARHWLQSFDYWGQGTLVTVSSAKTTAPSVYPLAPVCGDTTGSSVTLGCLVKGYFPEPVTLTWNSGSLSSGVHTFPAVLQSDLYTLSSSVTVTSSTWPSQSITCNVAHPASSTKVDKKIEPRGPTIKPCPPCKCPAPNLLGGPSVFIFPPKIKDVLMISLSPIVTCVVVDVSEDDPDVQISWFVNNVEVHTAQTQTHREDYNSTLRVVSALPIQHQDWMSGKEFKCKVNNKDLPAPIERTISKPKGSVRAPQVYVLPPPEEEMTKKQVTLTCMVTDFMPEDIYVEWTNNGKTELNYKNTEPVLDSDGSYFMYSKLRVEKKNWVERNSYSCSVVHEGLHNHHTTKSFSRTPGK

SEQ ID NO: 777 - protein, 214 aa, Homo sapiens
  REGION 1..214: note = Description of sequence: I23RB321
  REGION 1..214: note = Description of type of peptide: Light Chain
DIQMTQSPSSLSASVGDRVTITCRASQSIGGDLNWYQQKPGKAPKLLIYAASSLQSGVPSRFSGSGSGTDFTLTISSLQPEDFATYYCQQSYSTPLTFGQGTKVEIKRADAAPTVSIFPPSSEQLTSGGASVVCFLNNFYPKDINVKWKIDGSERQNGVLNSWTDQDSKDSTYSMSSTLTLTKDEYERHNSYTCEATHKTSTSPIVKSFNRNEC

SEQ ID NO: 778 - protein, 451 aa, Homo sapiens; identical to SEQ ID NO: 682
  REGION 1..451: note = Description of sequence: I23RB328
  REGION 1..451: note = Description of type of peptide: Heavy Chain

SEQ ID NO: 779 - protein, 214 aa, Homo sapiens
  REGION 1..214: note = Description of sequence: I23RB328
  REGION 1..214: note = Description of type of peptide: Light Chain
EIVLTQSPATLSLSPGERATLSCRASQSVSSYLAWYQQKPGQAPRLLIYDASNRATGVPARFSGSGTGTDFTLTISSLQPEDVAVYYCQQRNSTPLTFGQGTKVEIKRADAAPTVSIFPPSSEQLTSGGASVVCFLNNFYPKDINVKWKIDGSERQNGVLNSWTDQDSKDSTYSMSSTLTLTKDEYERHNSYTCEATHKTSTSPIVKSFNRNEC

SEQ ID NO: 780 - protein, 453 aa, Homo sapiens; identical to SEQ ID NO: 680
  REGION 1..453: note = Description of sequence: I23RB329
  REGION 1..453: note = Description of type of peptide: Heavy Chain

SEQ ID NO: 781 - protein, 214 aa, Homo sapiens
  REGION 1..214: note = Description of sequence: I23RB329
  REGION 1..214: note = Description of type of peptide: Light Chain
EIVLTQSPATLSLSPGERATLSCRASQSVSSYLAWYQQKPGQAPRLLIYDASNRATGIPARFSGTGSGTDFTLTISSLEPEDFATYYCQQRSNTPLTFGQGTKVEIKRADAAPTVSIFPPSSEQLTSGGASVVCFLNNFYPKDINVKWKIDGSERQNGVLNSWTDQDSKDSTYSMSSTLTLTKDEYERHNSYTCEATHKTSTSPIVKSFNRNEC

SEQ ID NO: 782 - protein, 457 aa, Homo sapiens; identical to SEQ ID NO: 688
  REGION 1..457: note = Description of sequence: I23RB330
  REGION 1..457: note = Description of type of peptide: Heavy Chain

SEQ ID NO: 783 - protein, 214 aa, Homo sapiens
  REGION 1..214: note = Description of sequence: I23RB330
  REGION 1..214: note = Description of type of peptide: Light Chain
EIVLTQSPATLSLSPGERATLSCRASQSVSSYLAWYQQKPGQAPRLLIYDASNRATGIPARFSGSGSGTDFTLTISSLEPEDFAVYYCQQRSNTPLTFGQGTKVEIKRADAAPTVSIFPPSSEQLTSGGASVVCFLNNFYPKDINVKWKIDGSERQNGVLNSWTDQDSKDSTYSMSSTLTLTKDEYERHNSYTCEATHKTSTSPIVKSFNRNEC

SEQ ID NO: 784 - protein, 445 aa, Mus musculus
  REGION 1..445: note = Description of sequence: I23RB332
  REGION 1..445: note = Description of type of peptide: Heavy Chain
QVQLQQPGAELVMPGASVKLSCKASGYTFTSYWMHWVKQRPGQGLEWIGEIDPSDSYTNYNQKFKGKSTLTVDKSSSTAYMQLSSLTSEDSAVYYCARSYAFDYWGQGTTVTVSSAKTTAPSVYPLAPVCGDTTGSSVTLGCLVKGYFPEPVTLTWNSGSLSSGVHTFPAVLQSDLYTLSSSVTVTSSTWPSQSITCNVAHPASSTKVDKKIEPRGPTIKPCPPCKCPAPNLLGGPSVFIFPPKIKDVLMISLSPIVTCVVVDVSEDDPDVQISWFVNNVEVHTAQTQTHREDYNSTLRVVSALPIQHQDWMSGKEFKCKVNNKDLPAPIERTISKPKGSVRAPQVYVLPPPEEEMTKKQVTLTCMVTDFMPEDIYVEWTNNGKTELNYKNTEPVLDSDGSYFMYSKLRVEKKNWVERNSYSCSVVHEGLHNHHTTKSFSRTPGK

SEQ ID NO: 785 - protein, 218 aa, Mus musculus
  REGION 1..218: note = Description of sequence: I23RB332
  REGION 1..218: note = Description of type of peptide: Light Chain
DIVLTQSPASLAVSLGQRATISCKASQSVDYDGDSYMNWYQQKPGQPPKLLIYAASNLESGIPARFSGSGSGTDFTLNIHPVEEEDAATYYCQQSNEDPWTFGGGTKLEIKRADAAPTVSIFPPSSEQLTSGGASVVCFLNNFYPKDINVKWKIDGSERQNGVLNSWTDQDSKDSTYSMSSTLTLTKDEYERHNSYTCEATHKTSTSPIVKSFNRNEC

SEQ ID NO: 786 - protein, 123 aa, Homo sapiens
  REGION 1..123: note = Description of sequence: I23RB1
  REGION 1..123: note = Description of type of peptide: Heavy chain variable region
QVQLVQSGAEVKKPGSSVKVSCKASGGTFKNYAISWVRQAPGQGLEWMGWIRPIFGTAYYAQKFQGRVTITADESTSTAYMELSSLRSEDTAVYYCARDSGSRYAGRYAFDYWGQGTLVTVSS

SEQ ID NO: 787 - protein, 107 aa, Homo sapiens
  REGION 1..107: note = Description of sequence: I23RB1
  REGION 1..107: note = Description of type of peptide: Lightchain variable region
EIVLTQSPATLSLSPGERATLSCRASQSVSSYLAWYQQKPGQAPRLLIYDASNRATGIPARFSGSGSGTDFTLTISSLEPEDFAVYYCQQRSNWPLTFGQGTKVEIK

SEQ ID NO: 788 - protein, 122 aa, Homo sapiens
  REGION 1..122: note = Description of sequence: I23RB2
  REGION 1..122: note = Description of type of peptide: Heavy chain variable region
QVQLVQSGAEVKKPGSSVKVSCKASGGTFSSYAISWVRQAPGQGLEWMGGIIPIFGTANYAQKFQGRVTITADESTSTAYMELSSLRSEDTAVYYCARDRYRYLGANGFDYWGQGTLVTVSS

SEQ ID NO: 789 - protein, 107 aa, Homo sapiens; identical to SEQ ID NO: 787
  REGION 1..107: note = Description of sequence: I23RB2
  REGION 1..107: note = Description of type of peptide: Lightchain variable region

SEQ ID NO: 790 - protein, 125 aa, Homo sapiens
  REGION 1..125: note = Description of sequence: I23RB3
  REGION 1..125: note = Description of type of peptide: Heavy chain variable region
QVQLVQSGAEVKKPGSSVKVSCKASGGTFKSYSIHWVRQAPGQGLEWMGGIIPYFGYANYAQKFQGRVTITADESTSTAYMELSSLRSEDTAVYYCARERGYYGSIYYGGGFDYWGQGTLVTVSS

SEQ ID NO: 791 - protein, 107 aa, Homo sapiens; identical to SEQ ID NO: 787
  REGION 1..107: note = Description of sequence: I23RB3
  REGION 1..107: note = Description of type of peptide: Lightchain variable region

SEQ ID NO: 792 - protein, 127 aa, Homo sapiens
  REGION 1..127: note = Description of sequence: I23RB4
  REGION 1..127: note = Description of type of peptide: Heavy chain variable region
QVQLVQSGAEVKKPGSSVKVSCKASGGTFKTYAIHWVRQAPGQGLEWMGWIIPIFGTANYAQKFQGRVTITADESTSTAYMELSSLRSEDTAVYYCARDGGYYGSRYYPRSYYFDYWGQGTLVTVSS

SEQ ID NO: 793 - protein, 107 aa, Homo sapiens; identical to SEQ ID NO: 787
  REGION 1..107: note = Description of sequence: I23RB4
  REGION 1..107: note = Description of type of peptide: Lightchain variable region

SEQ ID NO: 794 - protein, 123 aa, Homo sapiens
  REGION 1..123: note = Description of sequence: I23RB5
  REGION 1..123: note = Description of type of peptide: Heavy chain variable region
QVQLVQSGAEVKKPGSSVKVSCKASGGTFSSYAISWVRQAPGQGLEWMGGIIPIFGTANYAQKFQGRVTITADESTSTAYMELSSLRSEDTAVYYCARDSYYSTVTYYYFDYWGQGTLVTVSS

SEQ ID NO: 795 - protein, 107 aa, Homo sapiens [sequence omitted]

SEQ ID NO: 796 - protein, 121 aa, Homo sapiens
  REGION 1..121: note = Description of sequence: I23RB6
  REGION 1..121: note = Description of type of peptide: Heavy chain variable region
QVQLVQSGAEVKKPGSSVKVSCKASGGTFSSYAISWVRQAPGQGLEWMGGIIPIFGTANYAQKFQGRVTITADESTSTAYMELSSLRSEDTAVYYCARGRYIRSYDYFDYWGQGTLVTVSS

SEQ ID NO: 797 - protein, 113 aa, Homo sapiens
  REGION 1..113: note = Description of sequence: I23RB6
  REGION 1..113: note = Description of type of peptide: Lightchain variable region
DIVMTQSPDSLAVSLGERATINCKSSQSVLYSSNNKNYLAWYQQKPGQPPKLLIYWASTRESGVPDRFSGSGSGTDFTLTISSLQAEDVAVYYCQQYYSTPLTFGQGTKVEIK

SEQ ID NO: 798 - protein, 122 aa, Mus musculus
  REGION 1..122: note = Description of sequence: I23RB7
  REGION 1..122: note = Description of type of peptide: Heavy chain variable region
QIQLVQSGPELKKPGETVKISCKASGYTFTTYGMSWVKQAPGKGLKWMGWINTYSGVPTYADDFKGRFAFSLETSASTAYLQINNLKNEDTATYYCARRDRYGYVAGAFAYWGQGTLVTVSS

SEQ ID NO: 799 - protein, 106 aa, Mus musculus
  REGION 1..106: note = Description of sequence: I23RB7
  REGION 1..106: note = Description of type of peptide: Lightchain variable region
QIVLTQSPAIMSASPGEKVTMTCSASSSVSYMYWYQQKPGSSPRLLIYDTSNLASGVPVRFSGSGSGTSYSLTISRMEAEDAATYYCQQWSSYPWTFGGGTKLEIK

SEQ ID NO: 800 - protein, 125 aa, Homo sapiens
  REGION 1..125: note = Description of sequence: I23RB8
  REGION 1..125: note = Description of type of peptide: Heavy chain variable region
QVQLVQSGAEVKKPGSSVKVSCKASGGTFKTDYINWVRQAPGQGLEWMGGIIPIFGTANYAQKFQGRVTITADESTSTAYMELSSLRSEDTAVYYCARGPSYAYGSRTYGYFDYWGQGTLVTVSS

SEQ ID NO: 801 - protein, 107 aa, Homo sapiens; identical to SEQ ID NO: 787
  REGION 1..107: note = Description of sequence: I23RB8
  REGION 1..107: note = Description of type of peptide: Lightchain variable region

SEQ ID NO: 802 - protein, 127 aa, Homo sapiens
  REGION 1..127: note = Description of sequence: I23RB9
  REGION 1..127: note = Description of type of peptide: Heavy chain variable region
QVQLVQSGAEVKKPGSSVKVSCKASGGTFSSYAISWVRQAPGQGLEWMGGIIPIFGTANYAQKFQGRVTITADESTSTAYMELSSLRSEDTAVYYCARDRSYSYGLSGLGYYGFDYWGQGTLVTVSS

SEQ ID NO: 803 - protein, 107 aa, Homo sapiens; identical to SEQ ID NO: 787
  REGION 1..107: note = Description of sequence: I23RB9
  REGION 1..107: note = Description of type of peptide: Lightchain variable region

SEQ ID NO: 804 - protein, 123 aa, Homo sapiens
  REGION 1..123: note = Description of sequence: I23RB10
  REGION 1..123: note = Description of type of peptide: Heavy chain variable region
QVQLVQSGAEVKKPGSSVKVSCKASGGTFSSYAIHWVRQAPGQGLEWMGRIIPISGRANYAQKFQGRVTITADESTSTAYMELSSLRSEDTAVYYCARDSYPSYGSGGAFGYWGQGTLVTVSS

SEQ ID NO: 805 - protein, 113 aa, Homo sapiens; identical to SEQ ID NO: 797
  REGION 1..113: note = Description of sequence: I23RB10
  REGION 1..113: note = Description of type of peptide: Lightchain variable region

SEQ ID NO: 806 - protein, 117 aa, Homo sapiens
  REGION 1..117: note = Description of sequence: I23RB259
  REGION 1..117: note = Description of type of peptide: Heavy chain variable region
QVQLVQSGAEVKKPGSSVKVSCKASGGTFSSYGISWVRQAPGQGLEWMGWISPIFGTTNYAQKFQGRVTITADESTSTAYMELSSLRSEDTAVYYCARMMMQSLDYWGQGTLVTVSS

SEQ ID NO: 807 - protein, 107 aa, Homo sapiens
  REGION 1..107: note = Description of sequence: I23RB259
  REGION 1..107: note = Description of type of peptide: Lightchain variable region
DIQMTQSPSSLSASVGDRVTITCRASQSISNDLNWYQQKPGKAPKLLIYAASSLQSGVPSRFSGSGSGTDFTLTISSLQPEDFATYYCQQSYSTPLTFGQGTKVEIK

SEQ ID NO: 808 - protein, 119 aa, Homo sapiens
  REGION 1..119: note = Description of sequence: I23RB260
  REGION 1..119: note = Description of type of peptide: Heavy chain variable region
QVQLVQSGAEVKKPGSSVKVSCKASGGTFSSYGISWVRQAPGQGLEWMGGIIPIFGTANYAQKFQGRVTITADESTSTAYMELSSLRSEDTAVYYCARDFGWSLWFDYWGQGTLVTVSS

SEQ ID NO: 809 - protein, 113 aa, Homo sapiens
  REGION 1..113: note = Description of sequence: I23RB260
  REGION 1..113: note = Description of type of peptide: Lightchain variable region
DIVMTQSPDSLAVSLGERATINCKSSQSVLYSSNNKNYLAWYQQKPGQPPKLLIYSASTRESGVPDRFSGSGSGTDFTLTISSLQAEDVAVYYCQQSFHVPWTFGQGTKVEIK

SEQ ID NO: 810 - protein, 117 aa, Homo sapiens
  REGION 1..117: note = Description of sequence: I23RB261
  REGION 1..117: note = Description of type of peptide: Heavy chain variable region
QVQLVQSGAEVKKPGSSVKVSCKASGGTFSSYAISWVRQAPGQGLEWMGWISPYFGTANYAQKFQGRVTITADESTSTAYMELSSLRSEDTAVYYCARMYRQGFDYWGQGTLVTVSS

SEQ ID NO: 811 - protein, 107 aa, Homo sapiens
  REGION 1..107: note = Description of sequence: I23RB261
  REGION 1..107: note = Description of type of peptide: Lightchain variable region
DIQMTQSPSSLSASVGDRVTITCRASQSINDDLNWYQQKPGKAPKLLIYAASSLQSGVPSRFSGSGSGTDFTLTISSLQPEDFATYYCQQSYSTPLTFGQGTKVEIK

SEQ ID NO: 812 - protein, 117 aa, Homo sapiens
  REGION 1..117: note = Description of sequence: I23RB262
  REGION 1..117: note = Description of type of peptide: Heavy chain variable region
QVQLVQSGAEVKKPGSSVKVSCKASGGTFSSYGISWVRQAPGQGLEWMGWISAIFGTANYAQKFQGRVTITADESTSTAYMELSSLRSEDTAVYYCARMLKQGFDYWGQGTLVTVSS

SEQ ID NO: 813 - protein, 107 aa, Homo sapiens
  REGION 1..107: note = Description of sequence: I23RB262
  REGION 1..107: note = Description of type of peptide: Lightchain variable region
DIQMTQSPSSLSASVGDRVTITCRASQSINKDLNWYQQKPGKAPKLLIYFASSLQSGVPSRFSGSGSGTDFTLTISSLQPEDFATYYCQQSYSTPLTFGQGTKVEIK

SEQ ID NO: 814 - protein, 117 aa, Homo sapiens
  REGION 1..117: note = Description of sequence: I23RB263
  REGION 1..117: note = Description of type of peptide: Heavy chain variable region
QVQLVQSGAEVKKPGSSVKVSCKASGGTFSSYAISWVRQAPGQGLEWMGGIIPIFGTANYAQKFQGRVTITADESTSTAYMELSSLRSEDTAVYYCARFHRFWLDYWGQGTLVTVSS

SEQ ID NO: 815 - protein, 107 aa, Homo sapiens
  REGION 1..107: note = Description of sequence: I23RB263
  REGION 1..107: note = Description of type of peptide: Lightchain variable region
DIQMTQSPSSLSASVGDRVTITCRASQSISSYLNWYQQKPGKAPKLLIYAASSLQSGVPSRFSGSGSGTDFTLTISSLQPEDFATYYCQQPYSVPFTFGQGTKVEIK

SEQ ID NO: 816 - protein, 117 aa, Homo sapiens
  REGION 1..117: note = Description of sequence: I23RB264
  REGION 1..117: note = Description of type of peptide: Heavy chain variable region
QVQLVQSGAEVKKPGSSVKVSCKASGGTFSSYAISWVRQAPGQGLEWMGGIIPIFGTANYAQKFQGRVTITADESTSTAYMELSSLRSEDTAVYYCARRSSPGFDYWGQGTLVTVSS

SEQ ID NO: 817 - protein, 107 aa, Homo sapiens
  REGION 1..107: note = Description of sequence: I23RB264
  REGION 1..107: note = Description of type of peptide: Lightchain variable region
DIQMTQSPSSLSASVGDRVTITCRASQSIDNDLNWYQQKPGKAPKLLIYNASSLQSGVPSRFSGSGSGTDFTLTISSLQPEDFATYYCQQPYSIPLTFGQGTKVEIK

SEQ ID NO: 818 - protein, 120 aa, Homo sapiens
  REGION 1..120: note = Description of sequence: I23RB265
  REGION 1..120: note = Description of type of peptide: Heavy chain variable region
QVQLVQSGAEVKKPGSSVKVSCKASGGTFSSYAISWVRQAPGQGLEWMGGIIPIFGTANYAQKFQGRVTITADESTSTAYMELSSLRSEDTAVYYCARGFVPTQGSLDYWGQGTLVTVSS

SEQ ID NO: 819 - protein, 107 aa, Homo sapiens
  REGION 1..107: note = Description of sequence: I23RB265
  REGION 1..107: note = Description of type of peptide: Lightchain variable region
DIQMTQSPSSLSASVGDRVTITCRASQSISTWLNWYQQKPGKAPKLLIYKASSLQSGVPSRFSGSGSGTDFTLTISSLQPEDFATYYCQQYNSPPLTFGQGTKVEIK

SEQ ID NO: 820 - protein, 123 aa, Homo sapiens
  REGION 1..123: note = Description of sequence: I23RB266
  REGION 1..123: note = Description of type of peptide: Heavy chain variable region
EVQLLESGGGLVQPGGSLRLSCAASGFTFSDYSMSWVRQAPGKGLEWVSVISGSGGSTYYADSVKGRFTISRDNSKNTLYLQMNSLRAEDTAVYYCAKHSMAGNSFLRFLDYWGQGTLVTVSS

SEQ ID NO: 821 - protein, 107 aa, Homo sapiens [sequence omitted]

SEQ ID NO: 822 - protein, 119 aa, Homo sapiens
  REGION 1..119: note = Description of sequence: I23RB267
  REGION 1..119: note = Description of type of peptide: Heavy chain variable region
EVQLVQSGAEVKKPGESLKISCKGSGYSFTSYWIGWVRQMPGKGLEWMGIIYPGDSDTRYSPSFQGQVTISADKSISTAYLQWSSLKASDTAMYYCARVWYSSWDLDYWGQGTLVTVSS

SEQ ID NO: 823 - protein, 108 aa, Homo sapiens
  REGION 1..108: note = Description of sequence: I23RB267
  REGION 1..108: note = Description of type of peptide: Lightchain variable region
EIVLTQSPGTLSLSPGERATLSCRASQSVSSSYLAWYQQKPGQAPRLLIYGASSRATGIPDRFSGSGSGTDFTLTISRLEPEDFAVYYCQQYGSSPLTFGQGTKVEIK

SEQ ID NO: 824 - protein, 127 aa, Homo sapiens
  REGION 1..127: note = Description of sequence: I23RB268
  REGION 1..127: note = Description of type of peptide: Heavy chain variable region
QVQLVQSGAEVKKPGSSVKVSCKASGGTFSSYYIHWVRQAPGQGLEWMGGIIPIFGYANYAQKFQGRVTITADESTSTAYMELSSLRSEDTAVYYCARDPGSYGSVYYRRSYYFDYWGQGTLVTVSS

SEQ ID NO: 825 - protein, 107 aa, Homo sapiens; identical to SEQ ID NO: 787
  REGION 1..107: note = Description of sequence: I23RB268
  REGION 1..107: note = Description of type of peptide: Lightchain variable region

SEQ ID NO: 826 - protein, 123 aa, Homo sapiens
  REGION 1..123: note = Description of sequence: I23RB269
  REGION 1..123: note = Description of type of peptide: Heavy chain variable region
QVQLVQSGAEVKKPGSSVKVSCKASGGTFSDASISWVRQAPGQGLEWMGTIIPISGNANYAQKFQGRVTITADESTSTAYMELSSLRSEDTAVYYCARDRYVWYYWDGYFDYWGQGTLVTVSS

SEQ ID NO: 827 - protein, 108 aa, Homo sapiens; identical to SEQ ID NO: 823
  REGION 1..108: note = Description of sequence: I23RB269
  REGION 1..108: note = Description of type of peptide: Lightchain variable region

SEQ ID NO: 828 - protein, 128 aa, Homo sapiens
  REGION 1..128: note = Description of sequence: I23RB270
  REGION 1..128: note = Description of type of peptide: Heavy chain variable region
QVQLVQSGAEVKKPGSSVKVSCKASGGTFDSYAISWVRQAPGQGLEWMGGIIPISGYANYAQKFQGRVTITADESTSTAYMELSSLRSEDTAVYYCARDLSGGYLGLRTLYYYYFDYWGQGTLVTVSS

SEQ ID NO: 829 - protein, 107 aa, Homo sapiens; identical to SEQ ID NO: 787
  REGION 1..107: note = Description of sequence: I23RB270
  REGION 1..107: note = Description of type of peptide: Lightchain variable region

SEQ ID NO: 830 - protein, 119 aa, Homo sapiens
  REGION 1..119: note = Description of sequence: I23RB271
  REGION 1..119: note = Description of type of peptide: Heavy chain variable region
EVQLLESGGGLVQPGGSLRLSCAASGFTFSSYAMSWVRQAPGKGLEWVSAISGSGGSTYYADSVKGRFTISRDNSKNTLYLQMNSLRAEDTAVYYCARDRGSAETFDYWGQGTLVTVSS

SEQ ID NO: 831 - protein, 107 aa, Homo sapiens [sequence omitted]

SEQ ID NO: 832 - protein, 120 aa, Homo sapiens
  REGION 1..120: note = Description of sequence: I23RB272
  REGION 1..120: note = Description of type of peptide: Heavy chain variable region
EVQLLESGGGLVQPGGSLRLSCAASGFTFSSYAMSWVRQAPGKGLEWVSAISGSGGSTYYADSVKGRFTISRDNSKNTLYLQMNSLRAEDTAVYYCARDFGEPNGGFDYWGQGTLVTVSS

SEQ ID NO: 833 - protein, 108 aa, Homo sapiens; identical to SEQ ID NO: 823
  REGION 1..108: note = Description of sequence: I23RB272
  REGION 1..108: note = Description of type of peptide: Lightchain variable region

SEQ ID NO: 834 - protein, 127 aa, Homo sapiens
  REGION 1..127: note = Description of sequence: I23RB273
  REGION 1..127: note = Description of type of peptide: Heavy chain variable region
EVQLLESGGGLVQPGGSLRLSCAASGFTFSSYAMSWVRQAPGKGLEWVSAISGSGGSTYYADSVKGRFTISRDNSKNTLYLQMNSLRAEDTAVYYCARDPSSYYYNGYLGSYAFDYWGQGTLVTVSS

SEQ ID NO: 835 - protein, 107 aa, Homo sapiens [sequence omitted]

SEQ ID NO: 836 - protein, 122 aa, Homo sapiens
  REGION 1..122: note = Description of sequence: I23RB274
  REGION 1..122: note = Description of type of peptide: Heavy chain variable region
EVQLLESGGGLVQPGGSLRLSCAASGFTFSSYAMSWVRQAPGKGLEWVSAISGSGGSTYYADSVKGRFTISRDNSKNTLYLQMNSLRAEDTAVYYCAREDATDSSDYYFDYWGQGTLVTVSS

SEQ ID NO: 837 - protein, 107 aa, Homo sapiens [sequence omitted]

SEQ ID NO: 838 - protein, 122 aa, Homo sapiens
  REGION 1..122: note = Description of sequence: I23RB275
  REGION 1..122: note = Description of type of peptide: Heavy chain variable region
EVQLLESGGGLVQPGGSLRLSCAASGFTFSDSGMSWVRQAPGKGLEWVSAIDGSGGTTYYADSVKGRFTISRDNSKNTLYLQMNSLRAEDTAVYYCARGSGGYVGYGGFDYWGQGTLVTVSS

SEQ ID NO: 839 - protein, 107 aa, Homo sapiens [sequence omitted]

SEQ ID NO: 840 - protein, 128 aa, Homo sapiens
  REGION 1..128: note = Description of sequence: I23RB276
  REGION 1..128: note = Description of type of peptide: Heavy chain variable region
EVQLLESGGGLVQPGGSLRLSCAASGFTFSNYAMSWVRQAPGKGLEWVSAISGSGGSTYYADSVKGRFTISRDNSKNTLYLQMNSLRAEDTAVYYCARDGSYGYRGRRRRYYDYFDYWGQGTLVTVSS

SEQ ID NO: 841 - protein, 107 aa, Homo sapiens [sequence omitted]

SEQ ID NO: 842 - protein, 118 aa, Homo sapiens
  REGION 1..118: note = Description of sequence: I23RB277
  REGION 1..118: note = Description of type of peptide: Heavy chain variable region
EVQLLESGGGLVQPGGSLRLSCAASGFTFSSYAMSWVRQAPGKGLEWVSAISGSGGSTYYADSVKGRFTISRDNSKNTLYLQMNSLRAEDTAVYYCARRRRYRYFDYWGQGTLVTVSS

SEQ ID NO: 843 - protein, 107 aa, Homo sapiens [sequence omitted]

SEQ ID NO: 844 - protein, 121 aa, Homo sapiens
  REGION 1..121: note = Description of sequence: I23RB278
  REGION 1..121: note = Description of type of peptide: Heavy chain variable region
EVQLLESGGGLVQPGGSLRLSCAASGFTFSSYAMSWVRQAPGKGLEWVSAISGSGGSTYYADSVKGRFTISRDNSKNTLYLQMNSLRAEDTAVYYCVRGGSLGGGFYFDYWGQGTLVTVSS

SEQ ID NO: 845 - protein, 108 aa, Homo sapiens; identical to SEQ ID NO: 823
  REGION 1..108: note = Description of sequence: I23RB278
  REGION 1..108: note = Description of type of peptide: Lightchain variable region

SEQ ID NO: 846 - protein, 123 aa, Homo sapiens
  REGION 1..123: note = Description of sequence: I23RB279
  REGION 1..123: note = Description of type of peptide: Heavy chain variable region
EVQLLESGGGLVQPGGSLRLSCAASGFTFDTYAMHWVRQAPGKGLEWVSWISGEGGSTEYADSVKGRFTISRDNSKNTLYLQMNSLRAEDTAVYYCARDLGAYNRPFYAFDYWGQGTLVTVSS

SEQ ID NO: 847 - protein, 107 aa, Homo sapiens [sequence omitted]

SEQ ID NO: 848 - protein, 126 aa, Homo sapiens
  REGION 1..126: note = Description of sequence: I23RB280
  REGION 1..126: note = Description of type of peptide: Heavy chain variable region
EVQLLESGGGLVQPGGSLRLSCAASGFTFSNAAMHWVRQAPGKGLEWVSRIDGSGGYTEYADSVKGRFTISRDNSKNTLYLQMNSLRAEDTAVYYCARELYSYLGSSYYYGYFDYWGQGTLVTVSS

SEQ ID NO: 849 - protein, 108 aa, Homo sapiens; identical to SEQ ID NO: 823
  REGION 1..108: note = Description of sequence: I23RB280
  REGION 1..108: note = Description of type of peptide: Lightchain variable region

SEQ ID NO: 850 - protein, 127 aa, Homo sapiens
  REGION 1..127: note = Description of sequence: I23RB281
  REGION 1..127: note = Description of type of peptide: Heavy chain variable region
EVQLLESGGGLVQPGGSLRLSCAASGFTFSSYAMSWVRQAPGKGLEWVSAISGSGGSTYYADSVKGRFTISRDNSKNTLYLQMNSLRAEDTAVYYCARGPYYSGTSGYRSGGGFDYWGQGTLVTVSS

SEQ ID NO: 851 - protein, 107 aa, Homo sapiens [sequence omitted]

SEQ ID NO: 852 - protein, 126 aa, Homo sapiens
  REGION 1..126: note = Description of sequence: I23RB282
  REGION 1..126: note = Description of type of peptide: Heavy chain variable region
EVQLLESGGGLVQPGGSLRLSCAASGFTFSNDAMNWVRQAPGKGLEWVSAIDGNGGSTNYADSVKGRFTISRDNSKNTLYLQMNSLRAEDTAVYYCARDLGGYYGRRRRYYGMDVWGQGTLVTVSS

SEQ ID NO: 853 - protein, 107 aa, Homo sapiens [sequence omitted]

SEQ ID NO: 854 - protein, 121 aa, Homo sapiens
  REGION 1..121: note = Description of sequence: I23RB283
  REGION 1..121: note = Description of type of peptide: Heavy chain variable region
EVQLLESGGGLVQPGGSLRLSCAAIGFTFSSSAMHWVRQAPGKGLEWVSAIDGEGGSTYYADSVKGRFTISRDNSKNTLYLQMNSLRAEDTAVYYCAREVSSYGRYGFGYWGQGTLVTVSS

SEQ ID NO: 855 - protein, 108 aa, Homo sapiens; identical to SEQ ID NO: 823
  REGION 1..108: note = Description of sequence: I23RB283
  REGION 1..108: note = Description of type of peptide: Lightchain variable region

SEQ ID NO: 856 - protein, 122 aa, Homo sapiens
  REGION 1..122: note = Description of sequence: I23RB284
  REGION 1..122: note = Description of type of peptide: Heavy chain variable region
EVQLLESGGGLVQPGGSLRLSCAASGFTFSSYAMSWVRQAPGKGLEWVSAISGSGGSTYYADSVKGRFTISRDNSKNTLYLQMNSLRAEDTAVYYCARGLAGNSSGGGFDYWGQGTLVTVSS

SEQ ID NO: 857 - protein, 107 aa, Homo sapiens [sequence omitted]

SEQ ID NO: 858 - protein, 125 aa, Homo sapiens
  REGION 1..125: note = Description of sequence: I23RB285
  REGION 1..125: note = Description of type of peptide: Heavy chain variable region
EVQLLESGGGLVQPGGSLRLSCAASGFTFDDYAMNWVRQAPGKGLEWVSAIAGNGGSTEYADSVKGRFTISRDNSKNTLYLQMNSLRAEDTAVYYCARDGGYPLTAVTGIYFDYWGQGTLVTVSS

SEQ ID NO: 859 - protein, 107 aa, Homo sapiens [sequence omitted]

SEQ ID NO: 860 - protein, 118 aa, Homo sapiens
  REGION 1..118: note = Description of sequence: I23RB286
  REGION 1..118: note = Description of type of peptide: Heavy chain variable region
EVQLLESGGGLVQPGGSLRLSCAASGFTFSDAGMSWVRQAPGKGLEWVSAISGNGGSTNYADSVKGRFTISRDNSKNTLYLQMNSLRAEDTAVYYCARRRRRASFDYWGQGTLVTVSS

SEQ ID NO: 861 - protein, 107 aa, Homo sapiens [sequence omitted]

SEQ ID NO: 862 - protein, 126 aa, Homo sapiens
  REGION 1..126: note = Description of sequence: I23RB287
  REGION 1..126: note = Description of type of peptide: Heavy chain variable region
EVQLVQSGAEVKKPGESLKISCKGSGYSFTDAAIHWVRQMPGKGLEWMGTIDPGDSTTRYSPSFQGQVTISADKSISTAYLQWSSLKASDTAVYYCARDLYYTLEYNWYYDAFDYWGQGTLVTVSS

SEQ ID NO: 863 - protein, 108 aa, Homo sapiens; identical to SEQ ID NO: 823
  REGION 1..108: note = Description of sequence: I23RB287
  REGION 1..108: note = Description of type of peptide: Lightchain variable region

SEQ ID NO: 864 - protein, 127 aa, Homo sapiens
  REGION 1..127: note = Description of sequence: I23RB288
  REGION 1..127: note = Description of type of peptide: Heavy chain variable region
EVQLVQSGAEVKKPGESLKISCKGSGYSFKSDWISWVRQMPGKGLEWMGWIYPGDSRTYYSPSFQGQVTISADKSISTAYLQWSSLKASDTAVYYCARDSSYGTGNRGGRSGAFDYWGQGTLVTVSS

SEQ ID NO: 865 - protein, 108 aa, Homo sapiens; identical to SEQ ID NO: 823
  REGION 1..108: note = Description of sequence: I23RB288
  REGION 1..108: note = Description of type of peptide: Lightchain variable region

SEQ ID NO: 866 - protein, 118 aa, Homo sapiens
  REGION 1..118: note = Description of sequence: I23RB289
  REGION 1..118: note = Description of type of peptide: Heavy chain variable region
EVQLVQSGAEVKKPGESLKISCKGSGYSFDSAGINWVRQMPGKGLEWMGNIYPGDSDTRYSPSFQGQVTISADKSISTAYLQWSSLKASDTAVYYCARGGGSLGFDYWGQGTLVTVSS

SEQ ID NO: 867 - protein, 107 aa, Homo sapiens [sequence omitted]

SEQ ID NO: 868 - protein, 127 aa, Homo sapiens
  REGION 1..127: note = Description of sequence: I23RB290
  REGION 1..127: note = Description of type of peptide: Heavy chain variable region
EVQLVQSGAEVKKPGESLKISCKGSGYSFKNDGIHWVRQMPGKGLEWMGWIAPGESTTGYSPSFQGQVTISADKSISTAYLQWSSLKASDTAVYYCARDLGGYGSASGRRSDYFDYWGQGTLVTVSS

SEQ ID NO: 869 - protein, 107 aa, Homo sapiens [sequence omitted]

SEQ ID NO: 870 - protein, 119 aa, Homo sapiens
  REGION 1..119: note = Description of sequence: I23RB291
  REGION 1..119: note = Description of type of peptide: Heavy chain variable region
EVQLVQSGAEVKKPGESLKISCKGSGYSFTSYYISWVRQMPGKGLEWMGNIYPGDSRTRYSPSFQGQVTISADKSISTAYLQWSSLKASDTAVYYCARDRYYGIPFDYWGQGTLVTVSS

SEQ ID NO: 871 - protein, 107 aa, Homo sapiens; identical to SEQ ID NO: 787
  REGION 1..107: note = Description of sequence: I23RB291
  REGION 1..107: note = Description of type of peptide: Lightchain variable region

SEQ ID NO: 872 - protein, 127 aa, Homo sapiens
  REGION 1..127: note = Description of sequence: I23RB292
  REGION 1..127: note = Description of type of peptide: Heavy chain variable region
EVQLVQSGAEVKKPGESLKISCKGSGYSFDTDYINWVRQMPGKGLEWMGYILPGESDTRYSPSFQGQVTISADKSISTAYLQWSSLKASDTAVYYCARGGGYGLVNRRRRSYAFDYWGQGTLVTVSS

SEQ ID NO: 873 - protein, 107 aa, Homo sapiens [sequence omitted]

SEQ ID NO: 874 - protein, 117 aa, Homo sapiens
  REGION 1..117: note = Description of sequence: I23RB313
  REGION 1..117: note = Description of type of peptide: Heavy chain variable region
QVQLVQSGAEVKKPGSSVKVSCKASGGTFSSYGISWVRQAPGQGLEWMGWISAIFGTTNYAQKFQGRVTITADESTSTAYMELSSLRSEDTAVYYCARGTVPGFDYWGQGTLVTVSS

SEQ ID NO: 875 - protein, 107 aa, Homo sapiens
  REGION 1..107: note = Description of sequence: I23RB313
  REGION 1..107: note = Description of type of peptide: Lightchain variable region
DIQMTQSPSSLSASVGDRVTITCRASQSIGEDLNWYQQKPGKAPKLLIYAASSLQSGVPSRFSGSGSGTDFTLTISSLQPEDFATYYCQQSYSTPLTFGQGTKVEIK

SEQ ID NO: 876 - protein, 117 aa, Homo sapiens
  REGION 1..117: note = Description of sequence: I23RB314
  REGION 1..117: note = Description of type of peptide: Heavy chain variable region
QVQLVQSGAEVKKPGSSVKVSCKASGGTFSSYGISWVRQAPGQGLEWMGWISPIFGTANYAQKFQGRVTITADESTSTAYMELSSLRSEDTAVYYCARMMMQGFDYWGQGTLVTVSS

SEQ ID NO: 877 - protein, 107 aa, Homo sapiens
  REGION 1..107: note = Description of sequence: I23RB314
  REGION 1..107: note = Description of type of peptide: Lightchain variable region
DIQMTQSPSSLSASVGDRVTITCRASQSISEDLNWYQQKPGKAPKLLIYAASSLQSGVPSRFSGSGSGTDFTLTISSLQPEDFATYYCQQSYSTPLTFGQGTKVEIK

SEQ ID NO: 878 - protein, 119 aa, Homo sapiens
  REGION 1..119: note = Description of sequence: I23RB315
  REGION 1..119: note = Description of type of peptide: Heavy chain variable region
QVQLVQSGAEVKKPGSSVKVSCKASGDTFSSYAISWVRQAPGQGLEWMGWISAIFGNANYAQKFQGRVTITADESTSTAYMELSSLRSEDTAVYYCARGAGWTLLLDYWGQGTLVTVSS

SEQ ID NO: 879 - protein, 107 aa, Homo sapiens
  REGION 1..107: note = Description of sequence: I23RB315
  REGION 1..107: note = Description of type of peptide: Lightchain variable region
EIVLTQSPATLSLSPGERATLSCRASQSVRKWLAWYQQKPGQAPRLLIYAASNRATGIPARFSGSGSGTDFTLTISSLEPEDFAVYYCQQYNNAPLTFGQGTKVEIK

SEQ ID NO: 880 - protein, 117 aa, Homo sapiens
  REGION 1..117: note = Description of sequence: I23RB316
  REGION 1..117: note = Description of type of peptide: Heavy chain variable region
QVQLVQSGAEVKKPGSSVKVSCKASGGTFSSYGISWVRQAPGQGLEWMGWIIPIFGTTNYAQKFQGRVTITADESTSTAYMELSSLRSEDTAVYYCARMMMQSLDYWGQGTLVTVSS

SEQ ID NO: 881 - protein, 107 aa, Homo sapiens; identical to SEQ ID NO: 807
  REGION 1..107: note = Description of sequence: I23RB316
  REGION 1..107: note = Description of type of peptide: Lightchain variable region

SEQ ID NO: 882 - protein, 121 aa, Homo sapiens
  REGION 1..121: note = Description of sequence: I23RB317
  REGION 1..121: note = Description of type of peptide: Heavy chain variable region
QVQLVQSGAEVKKPGSSVKVSCKASGGTFSSYAISWVRQAPGQGLEWMGGIIPIFGTANYAQKFQGRVTITADESTSTAYMELSSLRSEDTAVYYCARGNGVNYHSELDYWGQGTLVTVSS

SEQ ID NO: 883 - protein, 107 aa, Homo sapiens
  REGION 1..107: note = Description of sequence: I23RB317
  REGION 1..107: note = Description of type of peptide: Lightchain variable region
EIVLTQSPATLSLSPGERATLSCRASQSVDSFLAWYQQKPGQAPRLLIYTASNRATGIPARFSGSGSGTDFTLTISSLEPEDFAVYYCQQGNSAPFTFGQGTKVEIK

SEQ ID NO: 884 - protein, 120 aa, Homo sapiens
  REGION 1..120: note = Description of sequence: I23RB318
  REGION 1..120: note = Description of type of peptide: Heavy chain variable region
QVQLVQSGAEVKKPGSSVKVSCKASGGTFSSYAISWVRQAPGQGLEWMGGIIPIFGTANYAQKFQGRVTITADESTSTAYMELSSLRSEDTAVYYCARVRARHRGSFDYWGQGTLVTVSS

SEQ ID NO: 885 - protein, 107 aa, Homo sapiens
  REGION 1..107: note = Description of sequence: I23RB318
  REGION 1..107: note = Description of type of peptide: Lightchain variable region
DIQMTQSPSSLSASVGDRVTITCRASQSIDRWLNWYQQKPGKAPKLLIYYASSLQSGVPSRFSGSGSGTDFTLTISSLQPEDFATYYCQQSYSTPLTFGQGTKVEIK

SEQ ID NO: 886 - protein, 117 aa, Homo sapiens
  REGION 1..117: note = Description of sequence: I23RB319
  REGION 1..117: note = Description of type of peptide: Heavy chain variable region
QVQLVQSGAEVKKPGSSVKVSCKASGGTFSSYGISWVRQAPGQGLEWMGWISAIFGTTNYAQKFQGRVTITADESTSTAYMELSSLRSEDTALYYCARPLKQAFDYWGQGTLVTVSS

SEQ ID NO: 887 - protein, 107 aa, Homo sapiens
  REGION 1..107: note = Description of sequence: I23RB319
  REGION 1..107: note = Description of type of peptide: Lightchain variable region
DIQMTQSPSSLSASVGDRVTITCRASQSITDDLNWYQQKPGKAPKLLIYAASSLQSGVPSRFSGSGSGTDFTLTISSLQPEDFATYYCQQSYSTPLTFGQGTKVEIK

SEQ ID NO: 888 - protein, 118 aa, Homo sapiens
  REGION 1..118: note = Description of sequence: I23RB320
  REGION 1..118: note = Description of type of peptide: Heavy chain variable region
QVQLVQSGAEVKKPGSSVKVSCKASGGTFSSYGISWVRQAPGQGLEWMGWISAIFGTTNYAQKFQGRVTITADESTSTAYMELSSLRSEDTAVYYCARNGTGNSFDYWGQGTLVTVSS

SEQ ID NO: 889 - protein, 107 aa, Homo sapiens
  REGION 1..107: note = Description of sequence: I23RB320
  REGION 1..107: note = Description of type of peptide: Lightchain variable region
DIQMTQSPSSLSASVGDRVTITCRASQSITSDLNWYQQKPGKAPKLLIYAASSLQSGVPSRFSGSGSGTDFTLTISSLQPEDFATYYCQQSYSTPLTFGQGTKVEIK

SEQ ID NO: 890 - protein, 117 aa, Homo sapiens
  REGION 1..117: note = Description of sequence: I23RB321
  REGION 1..117: note = Description of type of peptide: Heavy chain variable region
QVQLVQSGAEVKKPGSSVKVSCKASGGTFSSYGISWVRQAPGQGLEWMGWISAIFGTTNYAQKFQGRVTITADESTSTAYMELSSLRSEDTAVYYCARHWLQSFDYWGQGTLVTVSS

SEQ ID NO: 891 - protein, 107 aa, Homo sapiens
  REGION 1..107: note = Description of sequence: I23RB321
  REGION 1..107: note = Description of type of peptide: Lightchain variable region
DIQMTQSPSSLSASVGDRVTITCRASQSIGGDLNWYQQKPGKAPKLLIYAASSLQSGVPSRFSGSGSGTDFTLTISSLQPEDFATYYCQQSYSTPLTFGQGTKVEIK

SEQ ID NO: 892 - protein, 121 aa, Homo sapiens; identical to SEQ ID NO: 796
  REGION 1..121: note = Description of sequence: I23RB328
  REGION 1..121: note = Description of type of peptide: Heavy chain variable region

SEQ ID NO: 893 - protein, 107 aa, Homo sapiens
  REGION 1..107: note = Description of sequence: I23RB328
  REGION 1..107: note = Description of type of peptide: Lightchain variable region
EIVLTQSPATLSLSPGERATLSCRASQSVSSYLAWYQQKPGQAPRLLIYDASNRATGVPARFSGSGTGTDFTLTISSLQPEDVAVYYCQQRNSTPLTFGQGTKVEIK

SEQ ID NO: 894 - protein, 123 aa, Homo sapiens; identical to SEQ ID NO: 794
  REGION 1..123: note = Description of sequence: I23RB329
  REGION 1..123: note = Description of type of peptide: Heavy chain variable region

SEQ ID NO: 895 - protein, 107 aa, Homo sapiens
  REGION 1..107: note = Description of sequence: I23RB329
  REGION 1..107: note = Description of type of peptide: Lightchain variable region
EIVLTQSPATLSLSPGERATLSCRASQSVSSYLAWYQQKPGQAPRLLIYDASNRATGIPARFSGTGSGTDFTLTISSLEPEDFATYYCQQRSNTPLTFGQGTKVEIK

SEQ ID NO: 896 - protein, 127 aa, Homo sapiens; identical to SEQ ID NO: 802
  REGION 1..127: note = Description of sequence: I23RB330
  REGION 1..127: note = Description of type of peptide: Heavy chain variable region

SEQ ID NO: 897 - protein, 107 aa, Homo sapiens
  REGION 1..107: note = Description of sequence: I23RB330
  REGION 1..107: note = Description of type of peptide: Lightchain variable region
EIVLTQSPATLSLSPGERATLSCRASQSVSSYLAWYQQKPGQAPRLLIYDASNRATGIPARFSGSGSGTDFTLTISSLEPEDFAVYYCQQRSNTPLTFGQGTKVEIK

SEQ ID NO: 898 - protein, 115 aa, Mus musculus
  REGION 1..115: note = Description of sequence: I23RB332
  REGION 1..115: note = Description of type of peptide: Heavy chain variable region
QVQLQQPGAELVMPGASVKLSCKASGYTFTSYWMHWVKQRPGQGLEWIGEIDPSDSYTNYNQKFKGKSTLTVDKSSSTAYMQLSSLTSEDSAVYYCARSYAFDYWGQGTTVTVSS

SEQ ID NO: 899 - protein, 111 aa, Mus musculus
  REGION 1..111: note = Description of sequence: I23RB332
  REGION 1..111: note = Description of type of peptide: Lightchain variable region
DIVLTQSPASLAVSLGQRATISCKASQSVDYDGDSYMNWYQQKPGQPPKLLIYAASNLESGIPARFSGSGSGTDFTLNIHPVEEEDAATYYCQQSNEDPWTFGGGTKLEIK

SEQ ID NO: 900 - protein, 8 aa, Homo sapiens
  REGION 1..8: note = Description of sequence: I23RB1
  REGION 1..8: note = Description of type of peptide: HCDR1
GGTFKNYA

SEQ ID NO: 901 - protein, 8 aa, Homo sapiens
  REGION 1..8: note = Description of sequence: I23RB1
  REGION 1..8: note = Description of type of peptide: HCDR2
IRPIFGTA

SEQ ID NO: 902 - protein, 16 aa, Homo sapiens
  REGION 1..16: note = Description of sequence: I23RB1
  REGION 1..16: note = Description of type of peptide: HCDR3
ARDSGSRYAGRYAFDY

SEQ ID NO: 903 - protein, 6 aa, Homo sapiens
  REGION 1..6: note = Description of sequence: I23RB1
  REGION 1..6: note = Description of type of peptide: LCDR1
QSVSSY

SEQ ID NO: 904 - skipped

SEQ ID NO: 905 - protein, 9 aa, Homo sapiens
  REGION 1..9: note = Description of sequence: I23RB1
  REGION 1..9: note = Description of type of peptide: LCDR3
QQRSNWPLT

SEQ ID NO: 906 - protein, 8 aa, Homo sapiens
  REGION 1..8: note = Description of sequence: I23RB2
  REGION 1..8: note = Description of type of peptide: HCDR1
GGTFSSYA

SEQ ID NO: 907 - protein, 8 aa, Homo sapiens
  REGION 1..8: note = Description of sequence: I23RB2
  REGION 1..8: note = Description of type of peptide: HCDR2
IIPIFGTA

SEQ ID NO: 908 - protein, 15 aa, Homo sapiens
  REGION 1..15: note = Description of sequence: I23RB2
  REGION 1..15: note = Description of type of peptide: HCDR3
ARDRYRYLGANGFDY

SEQ ID NO: 909 - protein, 6 aa, Homo sapiens
  REGION 1..6: note = Description of sequence: I23RB2
  REGION 1..6: note = Description of type of peptide: LCDR1
QSVSSY

SEQ ID NO: 910 - skipped

SEQ ID NO: 911 - protein, 9 aa, Homo sapiens
  REGION 1..9: note = Description of sequence: I23RB2
  REGION 1..9: note = Description of type of peptide: LCDR3
QQRSNWPLT

SEQ ID NO: 912 - protein, 8 aa, Homo sapiens
  REGION 1..8: note = Description of sequence: I23RB3
  REGION 1..8: note = Description of type of peptide: HCDR1
GGTFKSYS

SEQ ID NO: 913 - protein, 8 aa, Homo sapiens
  REGION 1..8: note = Description of sequence: I23RB3
  REGION 1..8: note = Description of type of peptide: HCDR2
IIPYFGYA

SEQ ID NO: 914 - protein, 18 aa, Homo sapiens
  REGION 1..18: note = Description of sequence: I23RB3
  REGION 1..18: note = Description of type of peptide: HCDR3
ARERGYYGSIYYGGGFDY

SEQ ID NO: 915 - protein, 6 aa, Homo sapiens
  REGION 1..6: note = Description of sequence: I23RB3
  REGION 1..6: note = Description of type of peptide: LCDR1
QSVSSY

SEQ ID NO: 916 - skipped

SEQ ID NO: 917 - protein, 9 aa, Homo sapiens
  REGION 1..9: note = Description of sequence: I23RB3
  REGION 1..9: note = Description of type of peptide: LCDR3
QQRSNWPLT

SEQ ID NO: 918 - protein, 8 aa, Homo sapiens
  REGION 1..8: note = Description of sequence: I23RB4
  REGION 1..8: note = Description of type of peptide: HCDR1
GGTFKTYA

SEQ ID NO: 919 - protein, 8 aa, Homo sapiens
  REGION 1..8: note = Description of sequence: I23RB4
  REGION 1..8: note = Description of type of peptide: HCDR2
IIPIFGTA

SEQ ID NO: 920 - protein, 20 aa, Homo sapiens
  REGION 1..20: note = Description of sequence: I23RB4
  REGION 1..20: note = Description of type of peptide: HCDR3
ARDGGYYGSRYYPRSYYFDY

SEQ ID NO: 921 - protein, 6 aa, Homo sapiens
  REGION 1..6: note = Description of sequence: I23RB4
  REGION 1..6: note = Description of type of peptide: LCDR1
QSVSSY

SEQ ID NO: 922 - skipped

SEQ ID NO: 923 - protein, 9 aa, Homo sapiens
  REGION 1..9: note = Description of sequence: I23RB4
  REGION 1..9: note = Description of type of peptide: LCDR3
QQRSNWPLT

SEQ ID NO: 924 - protein, 8 aa, Homo sapiens
  REGION 1..8: note = Description of sequence: I23RB5
  REGION 1..8: note = Description of type of peptide: HCDR1
GGTFSSYA

SEQ ID NO: 925 - protein, 8 aa, Homo sapiens
  REGION 1..8: note = Description of sequence: I23RB5
  REGION 1..8: note = Description of type of peptide: HCDR2
IIPIFGTA

SEQ ID NO: 926 - protein, 16 aa, Homo sapiens
  REGION 1..16: note = Description of sequence: I23RB5
  REGION 1..16: note = Description of type of peptide: HCDR3
ARDSYYSTVTYYYFDY

SEQ ID NO: 927 - protein, 6 aa, Homo sapiens
  REGION 1..6: note = Description of sequence: I23RB5
  REGION 1..6: note = Description of type of peptide: LCDR1
QSISSY

SEQ ID NO: 928 - skipped

SEQ ID NO: 929 - protein, 9 aa, Homo sapiens
  REGION 1..9: note = Description of sequence: I23RB5
  REGION 1..9: note = Description of type of peptide: LCDR3
QQSYSTPLT

SEQ ID NO: 930 - protein, 8 aa, Homo sapiens
  REGION 1..8: note = Description of sequence: I23RB6
  REGION 1..8: note = Description of type of peptide: HCDR1
GGTFSSYA

SEQ ID NO: 931 - protein, 8 aa, Homo sapiens
  REGION 1..8: note = Description of sequence: I23RB6
  REGION 1..8: note = Description of type of peptide: HCDR2
IIPIFGTA

SEQ ID NO: 932 - protein, 14 aa, Homo sapiens
  REGION 1..14: note = Description of sequence: I23RB6
  REGION 1..14: note = Description of type of peptide: HCDR3
ARGRYIRSYDYFDY

SEQ ID NO: 933 - protein, 12 aa, Homo sapiens
  REGION 1..12: note = Description of sequence: I23RB6
  REGION 1..12: note = Description of type of peptide: LCDR1
QSVLYSSNNKNY

SEQ ID NO: 934 - skipped

SEQ ID NO: 935 - protein, 9 aa, Homo sapiens
  REGION 1..9: note = Description of sequence: I23RB6
  REGION 1..9: note = Description of type of peptide: LCDR3
QQYYSTPLT

SEQ ID NO: 936 - protein, 8 aa, Mus musculus
  REGION 1..8: note = Description of sequence: I23RB7
  REGION 1..8: note = Description of type of peptide: HCDR1
GYTFTTYG

SEQ ID NO: 937 - protein, 8 aa, Mus musculus
  REGION 1..8: note = Description of sequence: I23RB7
  REGION 1..8: note = Description of type of peptide: HCDR2
INTYSGVP

SEQ ID NO: 938 - protein, 15 aa, Mus musculus
  REGION 1..15: note = Description of sequence: I23RB7
  REGION 1..15: note = Description of type of peptide: HCDR3
ARRDRYGYVAGAFAY

SEQ ID NO: 939 - protein, 5 aa, Mus musculus
  REGION 1..5: note = Description of sequence: I23RB7
  REGION 1..5: note = Description of type of peptide: LCDR1
SSVSY

SEQ ID NO: 940 - skipped

SEQ ID NO: 941 - protein, 9 aa, Mus musculus
  REGION 1..9: note = Description of sequence: I23RB7
  REGION 1..9: note = Description of type of peptide: LCDR3
QQWSSYPWT

SEQ ID NO: 942 - protein, 8 aa, Homo sapiens
  REGION 1..8: note = Description of sequence: I23RB8
  REGION 1..8: note = Description of type of peptide: HCDR1
GGTFKTDY

SEQ ID NO: 943 - protein, 8 aa, Homo sapiens
  REGION 1..8: note = Description of sequence: I23RB8
  REGION 1..8: note = Description of type of peptide: HCDR2
IIPIFGTA

SEQ ID NO: 944 - protein, 18 aa, Homo sapiens
  REGION 1..18: note = Description of sequence: I23RB8
  REGION 1..18: note = Description of type of peptide: HCDR3
ARGPSYAYGSRTYGYFDY

SEQ ID NO: 945 - protein, 6 aa, Homo sapiens
  REGION 1..6: note = Description of sequence: I23RB8
  REGION 1..6: note = Description of type of peptide: LCDR1
QSVSSY

SEQ ID NO: 946 - skipped

SEQ ID NO: 947 - protein, 9 aa, Homo sapiens
  REGION 1..9: note = Description of sequence: I23RB8
  REGION 1..9: note = Description of type of peptide: LCDR3
QQRSNWPLT

SEQ ID NO: 948 - protein, 8 aa, Homo sapiens
  REGION 1..8: note = Description of sequence: I23RB9
  REGION 1..8: note = Description of type of peptide: HCDR1
GGTFSSYA

SEQ ID NO: 949 - protein, 8 aa, Homo sapiens
  REGION 1..8: note = Description of sequence: I23RB9
  REGION 1..8: note = Description of type of peptide: HCDR2
IIPIFGTA

SEQ ID NO: 950 - protein, 20 aa, Homo sapiens
  REGION 1..20: note = Description of sequence: I23RB9
  REGION 1..20: note = Description of type of peptide: HCDR3
ARDRSYSYGLSGLGYYGFDY

SEQ ID NO: 951 - protein, 6 aa, Homo sapiens
  REGION 1..6: note = Description of sequence: I23RB9
  REGION 1..6: note = Description of type of peptide: LCDR1
QSVSSY

SEQ ID NO: 952 - skipped

SEQ ID NO: 953 - protein, 9 aa, Homo sapiens
  REGION 1..9: note = Description of sequence: I23RB9
  REGION 1..9: note = Description of type of peptide: LCDR3
QQRSNWPLT

SEQ ID NO: 954 - protein, 8 aa, Homo sapiens
  REGION 1..8: note = Description of sequence: I23RB10
  REGION 1..8: note = Description of type of peptide: HCDR1
GGTFSSYA

SEQ ID NO: 955 - protein, 8 aa, Homo sapiens
  REGION 1..8: note = Description of sequence: I23RB10
  REGION 1..8: note = Description of type of peptide: HCDR2
IIPISGRA

SEQ ID NO: 956 - protein, 16 aa, Homo sapiens
  REGION 1..16: note = Description of sequence: I23RB10
  REGION 1..16: note = Description of type of peptide: HCDR3
ARDSYPSYGSGGAFGY

SEQ ID NO: 957 - protein, 12 aa, Homo sapiens
  REGION 1..12: note = Description of sequence: I23RB10
  REGION 1..12: note = Description of type of peptide: LCDR1
QSVLYSSNNKNY

SEQ ID NO: 958 - skipped

SEQ ID NO: 959 - protein, 9 aa, Homo sapiens
  REGION 1..9: note = Description of sequence: I23RB10
  REGION 1..9: note = Description of type of peptide: LCDR3
QQYYSTPLT

SEQ ID NO: 960 - protein, 8 aa, Homo sapiens
  REGION 1..8: note = Description of sequence: I23RB259
  REGION 1..8: note = Description of type of peptide: HCDR1
GGTFSSYG

SEQ ID NO: 961 - protein, 8 aa, Homo sapiens
  REGION 1..8: note = Description of sequence: I23RB259
  REGION 1..8: note = Description of type of peptide: HCDR2
ISPIFGTT

SEQ ID NO: 962 - protein, 10 aa, Homo sapiens
  REGION 1..10: note = Description of sequence: I23RB259
  REGION 1..10: note = Description of type of peptide: HCDR3
ARMMMQSLDY

SEQ ID NO: 963 - protein, 6 aa, Homo sapiens
  REGION 1..6: note = Description of sequence: I23RB259
  REGION 1..6: note = Description of type of peptide: LCDR1
QSISND

SEQ ID NO: 964 - skipped

SEQ ID NO: 965 - protein, 9 aa, Homo sapiens
  REGION 1..9: note = Description of sequence: I23RB259
  REGION 1..9: note = Description of type of peptide: LCDR3
QQSYSTPLT

SEQ ID NO: 966 - protein, 8 aa, Homo sapiens
  REGION 1..8: note = Description of sequence: I23RB260
  REGION 1..8: note = Description of type of peptide: HCDR1
GGTFSSYG

SEQ ID NO: 967 - protein, 8 aa, Homo sapiens
  REGION 1..8: note = Description of sequence: I23RB260
  REGION 1..8: note = Description of type of peptide: HCDR2
IIPIFGTA

SEQ ID NO: 968 - protein, 12 aa, Homo sapiens
  REGION 1..12: note = Description of sequence: I23RB260
  REGION 1..12: note = Description of type of peptide: HCDR3
ARDFGWSLWFDY

SEQ ID NO: 969 - protein, 12 aa, Homo sapiens
  REGION 1..12: note = Description of sequence: I23RB260
  REGION 1..12: note = Description of type of peptide: LCDR1
QSVLYSSNNKNY

SEQ ID NO: 970 - skipped

SEQ ID NO: 971 - protein, 9 aa, Homo sapiens
  REGION 1..9: note = Description of sequence: I23RB260
  REGION 1..9: note = Description of type of peptide: LCDR3
QQSFHVPWT

SEQ ID NO: 972 - protein, 8 aa, Homo sapiens
  REGION 1..8: note = Description of sequence: I23RB261
  REGION 1..8: note = Description of type of peptide: HCDR1
GGTFSSYA

SEQ ID NO: 973 - protein, 8 aa, Homo sapiens
  REGION 1..8: note = Description of sequence: I23RB261
  REGION 1..8: note = Description of type of peptide: HCDR2
ISPYFGTA

SEQ ID NO: 974 - protein, 10 aa, Homo sapiens
  REGION 1..10: note = Description of sequence: I23RB261
  REGION 1..10: note = Description of type of peptide: HCDR3
ARMYRQGFDY

SEQ ID NO: 975 - protein, 6 aa, Homo sapiens
  REGION 1..6: note = Description of sequence: I23RB261
  REGION 1..6: note = Description of type of peptide: LCDR1
QSINDD

SEQ ID NO: 976 - skipped

SEQ ID NO: 977 - protein, 9 aa, Homo sapiens
  REGION 1..9: note = Description of sequence: I23RB261
  REGION 1..9: note = Description of type of peptide: LCDR3
QQSYSTPLT

SEQ ID NO: 978 - protein, 8 aa, Homo sapiens
  REGION 1..8: note = Description of sequence: I23RB262
  REGION 1..8: note = Description of type of peptide: HCDR1
GGTFSSYG

SEQ ID NO: 979 - protein, 8 aa, Homo sapiens
  REGION 1..8: note = Description of sequence: I23RB262
  REGION 1..8: note = Description of type of peptide: HCDR2
ISAIFGTA

SEQ ID NO: 980 - protein, 10 aa, Homo sapiens
  REGION 1..10: note = Description of sequence: I23RB262
  REGION 1..10: note = Description of type of peptide: HCDR3
ARMLKQGFDY

SEQ ID NO: 981 - protein, 6 aa, Homo sapiens
  REGION 1..6: note = Description of sequence: I23RB262
  REGION 1..6: note = Description of type of peptide: LCDR1
QSINKD

SEQ ID NO: 982 - skipped

SEQ ID NO: 983 - protein, 9 aa, Homo sapiens
  REGION 1..9: note = Description of sequence: I23RB262
  REGION 1..9: note = Description of type of peptide: LCDR3
QQSYSTPLT

SEQ ID NO: 984 - protein, 8 aa, Homo sapiens
  REGION 1..8: note = Description of sequence: I23RB263
  REGION 1..8: note = Description of type of peptide: HCDR1
GGTFSSYA

SEQ ID NO: 985 - protein, 8 aa, Homo sapiens
  REGION 1..8: note = Description of sequence: I23RB263
  REGION 1..8: note = Description of type of peptide: HCDR2
IIPIFGTA

SEQ ID NO: 986 - protein, 10 aa, Homo sapiens
  REGION 1..10: note = Description of sequence: I23RB263
  REGION 1..10: note = Description of type of peptide: HCDR3
ARFHRFWLDY

SEQ ID NO: 987 - protein, 6 aa, Homo sapiens
  REGION 1..6: note = Description of sequence: I23RB263
  REGION 1..6: note = Description of type of peptide: LCDR1
QSISSY

SEQ ID NO: 988 - skipped

SEQ ID NO: 989 - protein, 9 aa, Homo sapiens
  REGION 1..9: note = Description of sequence: I23RB263
  REGION 1..9: note = Description of type of peptide: LCDR3
QQPYSVPFT

SEQ ID NO: 990 - protein, 8 aa, Homo sapiens
  REGION 1..8: note = Description of sequence: I23RB264
  REGION 1..8: note = Description of type of peptide: HCDR1
GGTFSSYA

SEQ ID NO: 991 - protein, 8 aa, Homo sapiens
  REGION 1..8: note = Description of sequence: I23RB264
  REGION 1..8: note = Description of type of peptide: HCDR2
IIPIFGTA

SEQ ID NO: 992 - protein, 10 aa, Homo sapiens
  REGION 1..10: note = Description of sequence: I23RB264
  REGION 1..10: note = Description of type of peptide: HCDR3
ARRSSPGFDY

SEQ ID NO: 993 - protein, 6 aa, Homo sapiens
  REGION 1..6: note = Description of sequence: I23RB264
  REGION 1..6: note = Description of type of peptide: LCDR1
QSIDND

SEQ ID NO: 994 - skipped

SEQ ID NO: 995 - protein, 9 aa, Homo sapiens
  REGION 1..9: note = Description of sequence: I23RB264
  REGION 1..9: note = Description of type of peptide: LCDR3
QQPYSIPLT

SEQ ID NO: 996 - protein, 8 aa, Homo sapiens
  REGION 1..8: note = Description of sequence: I23RB265
  REGION 1..8: note = Description of type of peptide: HCDR1
GGTFSSYA

SEQ ID NO: 997 - protein, 8 aa, Homo sapiens
  REGION 1..8: note = Description of sequence: I23RB265
  REGION 1..8: note = Description of type of peptide: HCDR2
IIPIFGTA

SEQ ID NO: 998 - protein, 13 aa, Homo sapiens
  REGION 1..13: note = Description of sequence: I23RB265
  REGION 1..13: note = Description of type of peptide: HCDR3
ARGFVPTQGSLDY

SEQ ID NO: 999 - protein, 6 aa, Homo sapiens
  REGION 1..6: note = Description of sequence: I23RB265
  REGION 1..6: note = Description of type of peptide: LCDR1
QSISTW

SEQ ID NO: 1000 - skipped

SEQ ID NO: 1001 - protein, 9 aa, Homo sapiens
  REGION 1..9: note = Description of sequence: I23RB265
  REGION 1..9: note = Description of type of peptide: LCDR3
QQYNSPPLT

SEQ ID NO: 1002 - protein, 8 aa, Homo sapiens
  REGION 1..8: note = Description of sequence: I23RB266
  REGION 1..8: note = Description of type of peptide: HCDR1
GFTFSDYS

SEQ ID NO: 1003 - protein, 8 aa, Homo sapiens
  REGION 1..8: note = Description of sequence: I23RB266
  REGION 1..8: note = Description of type of peptide: HCDR2
ISGSGGST

SEQ ID NO: 1004 - protein, 16 aa, Homo sapiens
  REGION 1..16: note = Description of sequence: I23RB266
  REGION 1..16: note = Description of type of peptide: HCDR3
AKHSMAGNSFLRFLDY

SEQ ID NO: 1005 - protein, 6 aa, Homo sapiens
  REGION 1..6: note = Description of sequence: I23RB266
  REGION 1..6: note = Description of type of peptide: LCDR1
QSISSY

SEQ ID NO: 1006 - skipped

SEQ ID NO: 1007 - protein, 9 aa, Homo sapiens
  REGION 1..9: note = Description of sequence: I23RB266
  REGION 1..9: note = Description of type of peptide: LCDR3
QQSYSTPLT

SEQ ID NO: 1008 - protein, 8 aa, Homo sapiens
  REGION 1..8: note = Description of sequence: I23RB267
  REGION 1..8: note = Description of type of peptide: HCDR1
GYSFTSYW

SEQ ID NO: 1009 - protein, 8 aa, Homo sapiens
  REGION 1..8: note = Description of sequence: I23RB267
  REGION 1..8: note = Description of type of peptide: HCDR2
IYPGDSDT

SEQ ID NO: 1010 - protein, 12 aa, Homo sapiens
  REGION 1..12: note = Description of sequence: I23RB267
  REGION 1..12: note = Description of type of peptide: HCDR3
ARVWYSSWDLDY

SEQ ID NO: 1011 - protein, 7 aa, Homo sapiens
  REGION 1..7: note = Description of sequence: I23RB267
  REGION 1..7: note = Description of type of peptide: LCDR1
QSVSSSY

SEQ ID NO: 1012 - skipped

SEQ ID NO: 1013 - protein, 9 aa, Homo sapiens
  REGION 1..9: note = Description of sequence: I23RB267
  REGION 1..9: note = Description of type of peptide: LCDR3
QQYGSSPLT

SEQ ID NO: 1014 - protein, 8 aa, Homo sapiens
  REGION 1..8: note = Description of sequence: I23RB268
  REGION 1..8: note = Description of type of peptide: HCDR1
GGTFSSYY

SEQ ID NO: 1015 - protein, 8 aa, Homo sapiens
  REGION 1..8: note = Description of sequence: I23RB268
  REGION 1..8: note = Description of type of peptide: HCDR2
IIPIFGYA

SEQ ID NO: 1016 - protein, 20 aa, Homo sapiens
  REGION 1..20: note = Description of sequence: I23RB268
  REGION 1..20: note = Description of type of peptide: HCDR3
ARDPGSYGSVYYRRSYYFDY

SEQ ID NO: 1017 - protein, 6 aa, Homo sapiens
  REGION 1..6: note = Description of sequence: I23RB268
  REGION 1..6: note = Description of type of peptide: LCDR1
QSVSSY

SEQ ID NO: 1018 - skipped

SEQ ID NO: 1019 - protein, 9 aa, Homo sapiens
  REGION 1..9: note = Description of sequence: I23RB268
  REGION 1..9: note = Description of type of peptide: LCDR3
QQRSNWPLT

SEQ ID NO: 1020 - protein, 8 aa, Homo sapiens
  REGION 1..8: note = Description of sequence: I23RB269
  REGION 1..8: note = Description of type of peptide: HCDR1
GGTFSDAS

SEQ ID NO: 1021 - protein, 8 aa, Homo sapiens
  REGION 1..8: note = Description of sequence: I23RB269
  REGION 1..8: note = Description of type of peptide: HCDR2
IIPISGNA

SEQ ID NO: 1022 - protein, 16 aa, Homo sapiens
  REGION 1..16: note = Description of sequence: I23RB269
  REGION 1..16: note = Description of type of peptide: HCDR3
ARDRYVWYYWDGYFDY

SEQ ID NO: 1023 - protein, 7 aa, Homo sapiens
  REGION 1..7: note = Description of sequence: I23RB269
  REGION 1..7: note = Description of type of peptide: LCDR1
QSVSSSY

SEQ ID NO: 1024 - skipped

SEQ ID NO: 1025 - protein, 9 aa, Homo sapiens
  REGION 1..9: note = Description of sequence: I23RB269
  REGION 1..9: note = Description of type of peptide: LCDR3
QQYGSSPLT

SEQ ID NO: 1026 - protein, 8 aa, Homo sapiens
  REGION 1..8: note = Description of sequence: I23RB270
  REGION 1..8: note = Description of type of peptide: HCDR1
GGTFDSYA

SEQ ID NO: 1027 - protein, 8 aa, Homo sapiens
  REGION 1..8: note = Description of sequence: I23RB270
  REGION 1..8: note = Description of type of peptide: HCDR2
IIPISGYA

SEQ ID NO: 1028 - protein, 21 aa, Homo sapiens
  REGION 1..21: note = Description of sequence: I23RB270
  REGION 1..21: note = Description of type of peptide: HCDR3
ARDLSGGYLGLRTLYYYYFDY

SEQ ID NO: 1029 - protein, 6 aa, Homo sapiens
  REGION 1..6: note = Description of sequence: I23RB270
  REGION 1..6: note = Description of type of peptide: LCDR1
QSVSSY

SEQ ID NO: 1030 - skipped

SEQ ID NO: 1031 - protein, 9 aa, Homo sapiens
  REGION 1..9: note = Description of sequence: I23RB270
  REGION 1..9: note = Description of type of peptide: LCDR3
QQRSNWPLT

SEQ ID NO: 1032 - protein, 8 aa, Homo sapiens
  REGION 1..8: note = Description of sequence: I23RB271
  REGION 1..8: note = Description of type of peptide: HCDR1
GFTFSSYA

SEQ ID NO: 1033 - protein, 8 aa, Homo sapiens
  REGION 1..8: note = Description of sequence: I23RB271
  REGION 1..8: note = Description of type of peptide: HCDR2
ISGSGGST

SEQ ID NO: 1034 - protein, 12 aa, Homo sapiens
  REGION 1..12: note = Description of sequence: I23RB271
  REGION 1..12: note = Description of type of peptide: HCDR3
ARDRGSAETFDY

SEQ ID NO: 1035 - protein, 6 aa, Homo sapiens
  REGION 1..6: note = Description of sequence: I23RB271
  REGION 1..6: note = Description of type of peptide: LCDR1
QSISSY

SEQ ID NO: 1036 - skipped

SEQ ID NO: 1037 - protein, 9 aa, Homo sapiens
  REGION 1..9: note = Description of sequence: I23RB271
  REGION 1..9: note = Description of type of peptide: LCDR3
QQSYSTPLT

SEQ ID NO: 1038 - protein, 8 aa, Homo sapiens
  REGION 1..8: note = Description of sequence: I23RB272
  REGION 1..8: note = Description of type of peptide: HCDR1
GFTFSSYA

SEQ ID NO: 1039 - protein, 8 aa, Homo sapiens
  REGION 1..8: note = Description of sequence: I23RB272
  REGION 1..8: note = Description of type of peptide: HCDR2
ISGSGGST

SEQ ID NO: 1040 - protein, 13 aa, Homo sapiens
  REGION 1..13: note = Description of sequence: I23RB272
  REGION 1..13: note = Description of type of peptide: HCDR3
ARDFGEPNGGFDY

SEQ ID NO: 1041 - protein, 7 aa, Homo sapiens
  REGION 1..7: note = Description of sequence: I23RB272
  REGION 1..7: note = Description of type of peptide: LCDR1
QSVSSSY

SEQ ID NO: 1042 - skipped

SEQ ID NO: 1043 - protein, 9 aa, Homo sapiens
  REGION 1..9: note = Description of sequence: I23RB272
  REGION 1..9: note = Description of type of peptide: LCDR3
QQYGSSPLT

SEQ ID NO: 1044 - protein, 8 aa, Homo sapiens
  REGION 1..8: note = Description of sequence: I23RB273
  REGION 1..8: note = Description of type of peptide: HCDR1
GFTFSSYA

SEQ ID NO: 1045 - protein, 8 aa, Homo sapiens
  REGION 1..8: note = Description of sequence: I23RB273
  REGION 1..8: note = Description of type of peptide: HCDR2
ISGSGGST

SEQ ID NO: 1046 - protein, 20 aa, Homo sapiens
  REGION 1..20: note = Description of sequence: I23RB273
  REGION 1..20: note = Description of type of peptide: HCDR3
ARDPSSYYYNGYLGSYAFDY

SEQ ID NO: 1047 - protein, 6 aa, Homo sapiens
  REGION 1..6: note = Description of sequence: I23RB273
  REGION 1..6: note = Description of type of peptide: LCDR1
QSISSY

SEQ ID NO: 1048 - skipped

SEQ ID NO: 1049 - protein, 9 aa, Homo sapiens
  REGION 1..9: note = Description of sequence: I23RB273
  REGION 1..9: note = Description of type of peptide: LCDR3
QQSYSTPLT

SEQ ID NO: 1050 - protein, 8 aa, Homo sapiens
  REGION 1..8: note = Description of sequence: I23RB274
  REGION 1..8: note = Description of type of peptide: HCDR1
GFTFSSYA

SEQ ID NO: 1051 - protein, 8 aa, Homo sapiens
  REGION 1..8: note = Description of sequence: I23RB274
  REGION 1..8: note = Description of type of peptide: HCDR2
ISGSGGST

SEQ ID NO: 1052 - protein, 15 aa, Homo sapiens
  REGION 1..15: note = Description of sequence: I23RB274
  REGION 1..15: note = Description of type of peptide: HCDR3
AREDATDSSDYYFDY

SEQ ID NO: 1053 - protein, 6 aa, Homo sapiens
  REGION 1..6: note = Description of sequence: I23RB274
  REGION 1..6: note = Description of type of peptide: LCDR1
QSISSY

SEQ ID NO: 1054 - skipped

SEQ ID NO: 1055 - protein, 9 aa, Homo sapiens
  REGION 1..9: note = Description of sequence: I23RB274
  REGION 1..9: note = Description of type of peptide: LCDR3
QQSYSTPLT

SEQ ID NO: 1056 - protein, 8 aa, Homo sapiens
  REGION 1..8: note = Description of sequence: I23RB275
  REGION 1..8: note = Description of type of peptide: HCDR1
GFTFSDSG

SEQ ID NO: 1057 - protein, 8 aa, Homo sapiens
  REGION 1..8: note = Description of sequence: I23RB275
  REGION 1..8: note = Description of type of peptide: HCDR2
IDGSGGTT

SEQ ID NO: 1058 - protein, 15 aa, Homo sapiens
  REGION 1..15: note = Description of sequence: I23RB275
  REGION 1..15: note = Description of type of peptide: HCDR3
ARGSGGYVGYGGFDY

SEQ ID NO: 1059 - protein, 6 aa, Homo sapiens
  REGION 1..6: note = Description of sequence: I23RB275
  REGION 1..6: note = Description of type of peptide: LCDR1
QSISSY

SEQ ID NO: 1060 - skipped

SEQ ID NO: 1061 - protein, 9 aa, Homo sapiens
  REGION 1..9: note = Description of sequence: I23RB275
  REGION 1..9: note = Description of type of peptide: LCDR3
QQSYSTPLT

SEQ ID NO: 1062 - protein, 8 aa, Homo sapiens
  REGION 1..8: note = Description of sequence: I23RB276
  REGION 1..8: note = Description of type of peptide: HCDR1
GFTFSNYA

SEQ ID NO: 1063 - protein, 8 aa, Homo sapiens
  REGION 1..8: note = Description of sequence: I23RB276
  REGION 1..8: note = Description of type of peptide: HCDR2
ISGSGGST

SEQ ID NO: 1064 - protein, 21 aa, Homo sapiens
  REGION 1..21: note = Description of sequence: I23RB276
  REGION 1..21: note = Description of type of peptide: HCDR3
ARDGSYGYRGRRRRYYDYFDY

SEQ ID NO: 1065 - protein, 6 aa, Homo sapiens
  REGION 1..6: note = Description of sequence: I23RB276
  REGION 1..6: note = Description of type of peptide: LCDR1
QSISSY

SEQ ID NO: 1066 - skipped

SEQ ID NO: 1067 - protein, 9 aa, Homo sapiens
  REGION 1..9: note = Description of sequence: I23RB276
  REGION 1..9: note = Description of type of peptide: LCDR3
QQSYSTPLT

SEQ ID NO: 1068 - protein, 8 aa, Homo sapiens
  REGION 1..8: note = Description of sequence: I23RB277
  REGION 1..8: note = Description of type of peptide: HCDR1
GFTFSSYA

SEQ ID NO: 1069 - protein, 8 aa, Homo sapiens
  REGION 1..8: note = Description of sequence: I23RB277
  REGION 1..8: note = Description of type of peptide: HCDR2
ISGSGGST

SEQ ID NO: 1070 - protein, 11 aa, Homo sapiens
  REGION 1..11: note = Description of sequence: I23RB277
  REGION 1..11: note = Description of type of peptide: HCDR3
ARRRRYRYFDY

SEQ ID NO: 1071 - protein, 6 aa, Homo sapiens
  REGION 1..6: note = Description of sequence: I23RB277
  REGION 1..6: note = Description of type of peptide: LCDR1
QSISSY

SEQ ID NO: 1072 - skipped

SEQ ID NO: 1073 - protein, 9 aa, Homo sapiens
  REGION 1..9: note = Description of sequence: I23RB277
  REGION 1..9: note = Description of type of peptide: LCDR3
QQSYSTPLT

SEQ ID NO: 1074 - protein, 8 aa, Homo sapiens
  REGION 1..8: note = Description of sequence: I23RB278
  REGION 1..8: note = Description of type of peptide: HCDR1
GFTFSSYA

SEQ ID NO: 1075 - protein, 8 aa, Homo sapiens
  REGION 1..8: note = Description of sequence: I23RB278
  REGION 1..8: note = Description of type of peptide: HCDR2
ISGSGGST

SEQ ID NO: 1076 - protein, 14 aa, Homo sapiens
  REGION 1..14: note = Description of sequence: I23RB278
  REGION 1..14: note = Description of type of peptide: HCDR3
VRGGSLGGGFYFDY

SEQ ID NO: 1077 - protein, 7 aa, Homo sapiens
  REGION 1..7: note = Description of sequence: I23RB278
  REGION 1..7: note = Description of type of peptide: LCDR1
QSVSSSY

SEQ ID NO: 1078 - skipped

SEQ ID NO: 1079 - protein, 9 aa, Homo sapiens
  REGION 1..9: note = Description of sequence: I23RB278
  REGION 1..9: note = Description of type of peptide: LCDR3
QQYGSSPLT

SEQ ID NO: 1080 - protein, 8 aa, Homo sapiens
  REGION 1..8: note = Description of sequence: I23RB279
  REGION 1..8: note = Description of type of peptide: HCDR1
GFTFDTYA

SEQ ID NO: 1081 - protein, 8 aa, Homo sapiens
  REGION 1..8: note = Description of sequence: I23RB279
  REGION 1..8: note = Description of type of peptide: HCDR2
ISGEGGST

SEQ ID NO: 1082 - protein, 16 aa, Homo sapiens
  REGION 1..16: note = Description of sequence: I23RB279
  REGION 1..16: note = Description of type of peptide: HCDR3
ARDLGAYNRPFYAFDY

SEQ ID NO: 1083 - protein, 6 aa, Homo sapiens
  REGION 1..6: note = Description of sequence: I23RB279
  REGION 1..6: note = Description of type of peptide: LCDR1
QSISSY

SEQ ID NO: 1084 - skipped

SEQ ID NO: 1085 - protein, 9 aa, Homo sapiens
  REGION 1..9: note = Description of sequence: I23RB279
  REGION 1..9: note = Description of type of peptide: LCDR3
QQSYSTPLT

SEQ ID NO: 1086 - protein, 8 aa, Homo sapiens
  REGION 1..8: note = Description of sequence: I23RB280
  REGION 1..8: note = Description of type of peptide: HCDR1
GFTFSNAA

SEQ ID NO: 1087 - protein, 8 aa, Homo sapiens
  REGION 1..8: note = Description of sequence: I23RB280
  REGION 1..8: note = Description of type of peptide: HCDR2
IDGSGGYT

SEQ ID NO: 1088 - protein, 19 aa, Homo sapiens
  REGION 1..19: note = Description of sequence: I23RB280
  REGION 1..19: note = Description of type of peptide: HCDR3
ARELYSYLGSSYYYGYFDY

SEQ ID NO: 1089 - protein, 7 aa, Homo sapiens
  REGION 1..7: note = Description of sequence: I23RB280
  REGION 1..7: note = Description of type of peptide: LCDR1
QSVSSSY

SEQ ID NO: 1090 - skipped

SEQ ID NO: 1091 - protein, 9 aa, Homo sapiens
  REGION 1..9: note = Description of sequence: I23RB280
  REGION 1..9: note = Description of type of peptide: LCDR3
QQYGSSPLT

SEQ ID NO: 1092 - protein, 8 aa, Homo sapiens
  REGION 1..8: note = Description of sequence: I23RB281
  REGION 1..8: note = Description of type of peptide: HCDR1
GFTFSSYA

SEQ ID NO: 1093 - protein, 8 aa, Homo sapiens
  REGION 1..8: note = Description of sequence: I23RB281
  REGION 1..8: note = Description of type of peptide: HCDR2
ISGSGGST

SEQ ID NO: 1094 - protein, 20 aa, Homo sapiens
  REGION 1..20: note = Description of sequence: I23RB281
  REGION 1..20: note = Description of type of peptide: HCDR3
ARGPYYSGTSGYRSGGGFDY

SEQ ID NO: 1095 - protein, 6 aa, Homo sapiens
  REGION 1..6: note = Description of sequence: I23RB281
  REGION 1..6: note = Description of type of peptide: LCDR1
QSISSY

SEQ ID NO: 1096 - skipped

SEQ ID NO: 1097 - protein, 9 aa, Homo sapiens
  REGION 1..9: note = Description of sequence: I23RB281
  REGION 1..9: note = Description of type of peptide: LCDR3
QQSYSTPLT

SEQ ID NO: 1098 - protein, 8 aa, Homo sapiens
  REGION 1..8: note = Description of sequence: I23RB282
  REGION 1..8: note = Description of type of peptide: HCDR1
GFTFSNDA

SEQ ID NO: 1099 - protein, 8 aa, Homo sapiens
  REGION 1..8: note = Description of sequence: I23RB282
  REGION 1..8: note = Description of type of peptide: HCDR2
IDGNGGST

SEQ ID NO: 1100 - protein, 19 aa, Homo sapiens
  REGION 1..19: note = Description of sequence: I23RB282
  REGION 1..19: note = Description of type of peptide: HCDR3
ARDLGGYYGRRRRYYGMDV

SEQ ID NO: 1101 - protein, 6 aa, Homo sapiens
  REGION 1..6: note = Description of sequence: I23RB282
  REGION 1..6: note = Description of type of peptide: LCDR1
QSISSY

SEQ ID NO: 1102 - skipped

SEQ ID NO: 1103 - protein, 9 aa, Homo sapiens
  REGION 1..9: note = Description of sequence: I23RB282
  REGION 1..9: note = Description of type of peptide: LCDR3
QQSYSTPLT

SEQ ID NO: 1104 - protein, 8 aa, Homo sapiens
  REGION 1..8: note = Description of sequence: I23RB283
  REGION 1..8: note = Description of type of peptide: HCDR1
GFTFSSSA

SEQ ID NO: 1105 - protein, 8 aa, Homo sapiens
  REGION 1..8: note = Description of sequence: I23RB283
  REGION 1..8: note = Description of type of peptide: HCDR2
IDGEGGST

SEQ ID NO: 1106 - protein, 14 aa, Homo sapiens
  REGION 1..14: note = Description of sequence: I23RB283
  REGION 1..14: note = Description of type of peptide: HCDR3
AREVSSYGRYGFGY

SEQ ID NO: 1107 - protein, 7 aa, Homo sapiens
  REGION 1..7: note = Description of sequence: I23RB283
  REGION 1..7: note = Description of type of peptide: LCDR1
QSVSSSY

SEQ ID NO: 1108 - skipped

SEQ ID NO: 1109 - protein, 9 aa, Homo sapiens
  REGION 1..9: note = Description of sequence: I23RB283
  REGION 1..9: note = Description of type of peptide: LCDR3
QQYGSSPLT

SEQ ID NO: 1110 - protein, 8 aa, Homo sapiens
  REGION 1..8: note = Description of sequence: I23RB284
  REGION 1..8: note = Description of type of peptide: HCDR1
GFTFSSYA

SEQ ID NO: 1111 - protein, 8 aa, Homo sapiens
  REGION 1..8: note = Description of sequence: I23RB284
  REGION 1..8: note = Description of type of peptide: HCDR2
ISGSGGST

SEQ ID NO: 1112 - protein, 15 aa, Homo sapiens
  REGION 1..15: note = Description of sequence: I23RB284
  REGION 1..15: note = Description of type of peptide: HCDR3
ARGLAGNSSGGGFDY

SEQ ID NO: 1113 - protein, 6 aa, Homo sapiens
  REGION 1..6: note = Description of sequence: I23RB284
  REGION 1..6: note = Description of type of peptide: LCDR1
QSISSY

SEQ ID NO: 1114 - skipped

SEQ ID NO: 1115 - protein, 9 aa, Homo sapiens
  REGION 1..9: note = Description of sequence: I23RB284
  REGION 1..9: note = Description of type of peptide: LCDR3
QQSYSTPLT

SEQ ID NO: 1116 - protein, 8 aa, Homo sapiens
  REGION 1..8: note = Description of sequence: I23RB285
  REGION 1..8: note = Description of type of peptide: HCDR1
GFTFDDYA

SEQ ID NO: 1117 - protein, 8 aa, Homo sapiens
  REGION 1..8: note = Description of sequence: I23RB285
  REGION 1..8: note = Description of type of peptide: HCDR2
IAGNGGST

SEQ ID NO: 1118 - protein, 18 aa, Homo sapiens
  REGION 1..18: note = Description of sequence: I23RB285
  REGION 1..18: note = Description of type of peptide: HCDR3
ARDGGYPLTAVTGIYFDY

SEQ ID NO: 1119 - protein, 6 aa, Homo sapiens
  REGION 1..6: note = Description of sequence: I23RB285
  REGION 1..6: note = Description of type of peptide: LCDR1
QSISSY

SEQ ID NO: 1120 - skipped

SEQ ID NO: 1121 - protein, 9 aa, Homo sapiens
  REGION 1..9: note = Description of sequence: I23RB285
  REGION 1..9: note = Description of type of peptide: LCDR3
QQSYSTPLT

SEQ ID NO: 1122 - protein, 8 aa, Homo sapiens
  REGION 1..8: note = Description of sequence: I23RB286
  REGION 1..8: note = Description of type of peptide: HCDR1
GFTFSDAG

SEQ ID NO: 1123 - protein, 8 aa, Homo sapiens
  REGION 1..8: note = Description of sequence: I23RB286
  REGION 1..8: note = Description of type of peptide: HCDR2
ISGNGGST

SEQ ID NO: 1124 - protein, 11 aa, Homo sapiens
  REGION 1..11: note = Description of sequence: I23RB286
  REGION 1..11: note = Description of type of peptide: HCDR3
ARRRRRASFDY

SEQ ID NO: 1125 - protein, 6 aa, Homo sapiens
  REGION 1..6: note = Description of sequence: I23RB286
  REGION 1..6: note = Description of type of peptide: LCDR1
QSISSY

SEQ ID NO: 1126 - skipped

SEQ ID NO: 1127 - protein, 9 aa, Homo sapiens
  REGION 1..9: note = Description of sequence: I23RB286
  REGION 1..9: note = Description of type of peptide: LCDR3
QQSYSTPLT

SEQ ID NO: 1128 - protein, 8 aa, Homo sapiens
  REGION 1..8: note = Description of sequence: I23RB287
  REGION 1..8: note = Description of type of peptide: HCDR1
GYSFTDAA

SEQ ID NO: 1129 - protein, 8 aa, Homo sapiens
  REGION 1..8: note = Description of sequence: I23RB287
  REGION 1..8: note = Description of type of peptide: HCDR2
IDPGDSTT

SEQ ID NO: 1130 - protein, 19 aa, Homo sapiens
  REGION 1..19: note = Description of sequence: I23RB287
  REGION 1..19: note = Description of type of peptide: HCDR3
ARDLYYTLEYNWYYDAFDY

SEQ ID NO: 1131 - protein, 7 aa, Homo sapiens
  REGION 1..7: note = Description of sequence: I23RB287
  REGION 1..7: note = Description of type of peptide: LCDR1
QSVSSSY

SEQ ID NO: 1132 - skipped

SEQ ID NO: 1133 - protein, 9 aa, Homo sapiens
  REGION 1..9: note = Description of sequence: I23RB287
  REGION 1..9: note = Description of type of peptide: LCDR3
QQYGSSPLT

SEQ ID NO: 1134 - protein, 8 aa, Homo sapiens
  REGION 1..8: note = Description of sequence: I23RB288
  REGION 1..8: note = Description of type of peptide: HCDR1
GYSFKSDW

SEQ ID NO: 1135 - protein, 8 aa, Homo sapiens
  REGION 1..8: note = Description of sequence: I23RB288
  REGION 1..8: note = Description of type of peptide: HCDR2
IYPGDSRT

SEQ ID NO: 1136 - protein, 20 aa, Homo sapiens
  REGION 1..20: note = Description of sequence: I23RB288
  REGION 1..20: note = Description of type of peptide: HCDR3
ARDSSYGTGNRGGRSGAFDY

SEQ ID NO: 1137 - protein, 7 aa, Homo sapiens
  REGION 1..7: note = Description of sequence: I23RB288
  REGION 1..7: note = Description of type of peptide: LCDR1
QSVSSSY

SEQ ID NO: 1138 - skipped

SEQ ID NO: 1139 - protein, 9 aa, Homo sapiens
  REGION 1..9: note = Description of sequence: I23RB288
  REGION 1..9: note = Description of type of peptide: LCDR3
QQYGSSPLT

SEQ ID NO: 1140 - protein, 8 aa, Homo sapiens
  REGION 1..8: note = Description of sequence: I23RB289
  REGION 1..8: note = Description of type of peptide: HCDR1
GYSFDSAG

SEQ ID NO: 1141 - protein, 8 aa, Homo sapiens
  REGION 1..8: note = Description of sequence: I23RB289
  REGION 1..8: note = Description of type of peptide: HCDR2
IYPGDSDT

SEQ ID NO: 1142 - protein, 11 aa, Homo sapiens
  REGION 1..11: note = Description of sequence: I23RB289
  REGION 1..11: note = Description of type of peptide: HCDR3
ARGGGSLGFDY

SEQ ID NO: 1143 - protein, 6 aa, Homo sapiens
  REGION 1..6: note = Description of sequence: I23RB289
  REGION 1..6: note = Description of type of peptide: LCDR1
QSISSY

SEQ ID NO: 1144 - skipped

SEQ ID NO: 1145 - protein, 9 aa, Homo sapiens
  REGION 1..9: note = Description of sequence: I23RB289
  REGION 1..9: note = Description of type of peptide: LCDR3
QQSYSTPLT

SEQ ID NO: 1146 - protein, 8 aa, Homo sapiens
  REGION 1..8: note = Description of sequence: I23RB290
  REGION 1..8: note = Description of type of peptide: HCDR1
GYSFKNDG

SEQ ID NO: 1147 - protein, 8 aa, Homo sapiens
  REGION 1..8: note = Description of sequence: I23RB290
  REGION 1..8: note = Description of type of peptide: HCDR2
IAPGESTT

SEQ ID NO: 1148 - protein, 20 aa, Homo sapiens
  REGION 1..20: note = Description of sequence: I23RB290
  REGION 1..20: note = Description of type of peptide: HCDR3
ARDLGGYGSASGRRSDYFDY

SEQ ID NO: 1149 - protein, 6 aa, Homo sapiens
  REGION 1..6: note = Description of sequence: I23RB290
  REGION 1..6: note = Description of type of peptide: LCDR1
QSISSY

SEQ ID NO: 1150 - skipped

SEQ ID NO: 1151 - protein, 9 aa, Homo sapiens
  REGION 1..9: note = Description of sequence: I23RB290
  REGION 1..9: note = Description of type of peptide: LCDR3
QQSYSTPLT

SEQ ID NO: 1152 - protein, 8 aa, Homo sapiens
  REGION 1..8: note = Description of sequence: I23RB291
  REGION 1..8: note = Description of type of peptide: HCDR1
GYSFTSYY

SEQ ID NO: 1153 - protein, 8 aa, Homo sapiens
  REGION 1..8: note = Description of sequence: I23RB291
  REGION 1..8: note = Description of type of peptide: HCDR2
IYPGDSRT

SEQ ID NO: 1154 - protein, 12 aa, Homo sapiens
  REGION 1..12: note = Description of sequence: I23RB291
  REGION 1..12: note = Description of type of peptide: HCDR3
ARDRYYGIPFDY

SEQ ID NO: 1155 - protein, 6 aa, Homo sapiens
  REGION 1..6: note = Description of sequence: I23RB291
  REGION 1..6: note = Description of type of peptide: LCDR1
QSVSSY

SEQ ID NO: 1156 - skipped

SEQ ID NO: 1157 - protein, 9 aa, Homo sapiens
  REGION 1..9: note = Description of sequence: I23RB291
  REGION 1..9: note = Description of type of peptide: LCDR3
QQRSNWPLT

SEQ ID NO: 1158 - protein, 8 aa, Homo sapiens
  REGION 1..8: note = Description of sequence: I23RB292
  REGION 1..8: note = Description of type of peptide: HCDR1
GYSFDTDY

SEQ ID NO: 1159 - protein, 8 aa, Homo sapiens
  REGION 1..8: note = Description of sequence: I23RB292
  REGION 1..8: note = Description of type of peptide: HCDR2
ILPGESDT

SEQ ID NO: 1160 - protein, 20 aa, Homo sapiens
  REGION 1..20: note = Description of sequence: I23RB292
  REGION 1..20: note = Description of type of peptide: HCDR3
ARGGGYGLVNRRRRSYAFDY

SEQ ID NO: 1161 - protein, 6 aa, Homo sapiens
  REGION 1..6: note = Description of sequence: I23RB292
  REGION 1..6: note = Description of type of peptide: LCDR1
QSISSY

SEQ ID NO: 1162 - skipped

SEQ ID NO: 1163 - protein, 9 aa, Homo sapiens
  REGION 1..9: note = Description of sequence: I23RB292
  REGION 1..9: note = Description of type of peptide: LCDR3
QQSYSTPLT

SEQ ID NO: 1164 - protein, 8 aa, Homo sapiens
  REGION 1..8: note = Description of sequence: I23RB313
  REGION 1..8: note = Description of type of peptide: HCDR1
GGTFSSYG

SEQ ID NO: 1165 - protein, 8 aa, Homo sapiens
  REGION 1..8: note = Description of sequence: I23RB313
  REGION 1..8: note = Description of type of peptide: HCDR2
ISAIFGTT

SEQ ID NO: 1166 - protein, 10 aa, Homo sapiens
  REGION 1..10: note = Description of sequence: I23RB313
  REGION 1..10: note = Description of type of peptide: HCDR3
ARGTVPGFDY

SEQ ID NO: 1167 - protein, 6 aa, Homo sapiens
  REGION 1..6: note = Description of sequence: I23RB313
  REGION 1..6: note = Description of type of peptide: LCDR1
QSIGED

SEQ ID NO: 1168 - skipped

SEQ ID NO: 1169 - protein, 9 aa, Homo sapiens
  REGION 1..9: note = Description of sequence: I23RB313
  REGION 1..9: note = Description of type of peptide: LCDR3
QQSYSTPLT

SEQ ID NO: 1170 - protein, 8 aa, Homo sapiens
  REGION 1..8: note = Description of sequence: I23RB314
  REGION 1..8: note = Description of type of peptide: HCDR1
GGTFSSYG

SEQ ID NO: 1171 - protein, 8 aa, Homo sapiens
  REGION 1..8: note = Description of sequence: I23RB314
  REGION 1..8: note = Description of type of peptide: HCDR2
ISPIFGTA

SEQ ID NO: 1172 - protein, 10 aa, Homo sapiens
  REGION 1..10: note = Description of sequence: I23RB314
  REGION 1..10: note = Description of type of peptide: HCDR3
ARMMMQGFDY

SEQ ID NO: 1173 - protein, 6 aa, Homo sapiens
  REGION 1..6: note = Description of sequence: I23RB314
  REGION 1..6: note = Description of type of peptide: LCDR1
QSISED

SEQ ID NO: 1174 - skipped

SEQ ID NO: 1175 - protein, 9 aa, Homo sapiens
  REGION 1..9: note = Description of sequence: I23RB314
  REGION 1..9: note = Description of type of peptide: LCDR3
QQSYSTPLT

SEQ ID NO: 1176 - protein, 8 aa, Homo sapiens
  REGION 1..8: note = Description of sequence: I23RB315
  REGION 1..8: note = Description of type of peptide: HCDR1
GDTFSSYA

SEQ ID NO: 1177 - protein, 8 aa, Homo sapiens
  REGION 1..8: note = Description of sequence: I23RB315
  REGION 1..8: note = Description of type of peptide: HCDR2
ISAIFGNA

SEQ ID NO: 1178 - protein, 12 aa, Homo sapiens
  REGION 1..12: note = Description of sequence: I23RB315
  REGION 1..12: note = Description of type of peptide: HCDR3
ARGAGWTLLLDY

SEQ ID NO: 1179 - protein, 6 aa, Homo sapiens
  REGION 1..6: note = Description of sequence: I23RB315
  REGION 1..6: note = Description of type of peptide: LCDR1
QSVRKW

SEQ ID NO: 1180 - skipped

SEQ ID NO: 1181 - protein, 9 aa, Homo sapiens
  REGION 1..9: note = Description of sequence: I23RB315
  REGION 1..9: note = Description of type of peptide: LCDR3
QQYNNAPLT

SEQ ID NO: 1182 - protein, 8 aa, Homo sapiens
  REGION 1..8: note = Description of sequence: I23RB316
  REGION 1..8: note = Description of type of peptide: HCDR1
GGTFSSYG

SEQ ID NO: 1183 - protein, 8 aa, Homo sapiens
  REGION 1..8: note = Description of sequence: I23RB316
  REGION 1..8: note = Description of type of peptide: HCDR2
IIPIFGTT

SEQ ID NO: 1184 - protein, 10 aa, Homo sapiens
  REGION 1..10: note = Description of sequence: I23RB316
  REGION 1..10: note = Description of type of peptide: HCDR3
ARMMMQSLDY

SEQ ID NO: 1185 - protein, 6 aa, Homo sapiens
  REGION 1..6: note = Description of sequence: I23RB316
  REGION 1..6: note = Description of type of peptide: LCDR1
QSISND

SEQ ID NO: 1186 - skipped

SEQ ID NO: 1187 - protein, 9 aa, Homo sapiens
  REGION 1..9: note = Description of sequence: I23RB316
  REGION 1..9: note = Description of type of peptide: LCDR3
QQSYSTPLT

SEQ ID NO: 1188 - protein, 8 aa, Homo sapiens
  REGION 1..8: note = Description of sequence: I23RB317
  REGION 1..8: note = Description of type of peptide: HCDR1
GGTFSSYA

SEQ ID NO: 1189 - protein, 8 aa, Homo sapiens
  REGION 1..8: note = Description of sequence: I23RB317
  REGION 1..8: note = Description of type of peptide: HCDR2
IIPIFGTA

SEQ ID NO: 1190 - protein, 14 aa, Homo sapiens
  REGION 1..14: note = Description of sequence: I23RB317
  REGION 1..14: note = Description of type of peptide: HCDR3
ARGNGVNYHSELDY

SEQ ID NO: 1191 - protein, 6 aa, Homo sapiens
  REGION 1..6: note = Description of sequence: I23RB317
  REGION 1..6: note = Description of type of peptide: LCDR1
QSVDSF

SEQ ID NO: 1192 - skipped

SEQ ID NO: 1193 - protein, 9 aa, Homo sapiens
  REGION 1..9: note = Description of sequence: I23RB317
  REGION 1..9: note = Description of type of peptide: LCDR3
QQGNSAPFT

SEQ ID NO: 1194 - protein, 8 aa, Homo sapiens
  REGION 1..8: note = Description of sequence: I23RB318
  REGION 1..8: note = Description of type of peptide: HCDR1
GGTFSSYA

SEQ ID NO: 1195 - protein, 8 aa, Homo sapiens
  REGION 1..8: note = Description of sequence: I23RB318
  REGION 1..8: note = Description of type of peptide: HCDR2
IIPIFGTA

SEQ ID NO: 1196 - protein, 13 aa, Homo sapiens
  REGION 1..13: note = Description of sequence: I23RB318
  REGION 1..13: note = Description of type of peptide: HCDR3
ARVRARHRGSFDY

SEQ ID NO: 1197 - protein, 6 aa, Homo sapiens
  REGION 1..6: note = Description of sequence: I23RB318
  REGION 1..6: note = Description of type of peptide: LCDR1
QSIDRW

SEQ ID NO: 1198 - skipped

SEQ ID NO: 1199 - protein, 9 aa, Homo sapiens
  REGION 1..9: note = Description of sequence: I23RB318
  REGION 1..9: note = Description of type of peptide: LCDR3
QQSYSTPLT

SEQ ID NO: 1200 - protein, 8 aa, Homo sapiens
  REGION 1..8: note = Description of sequence: I23RB319
  REGION 1..8: note = Description of type of peptide: HCDR1
GGTFSSYG

SEQ ID NO: 1201 - protein, 8 aa, Homo sapiens
  REGION 1..8: note = Description of sequence: I23RB319
  REGION 1..8: note = Description of type of peptide: HCDR2
ISAIFGTT

SEQ ID NO: 1202 - protein, 10 aa, Homo sapiens
  REGION 1..10: note = Description of sequence: I23RB319
  REGION 1..10: note = Description of type of peptide: HCDR3
ARPLKQAFDY

SEQ ID NO: 1203 - protein, 6 aa, Homo sapiens
  REGION 1..6: note = Description of sequence: I23RB319
  REGION 1..6: note = Description of type of peptide: LCDR1
QSITDD

SEQ ID NO: 1204 - skipped

SEQ ID NO: 1205 - protein, 9 aa, Homo sapiens
  REGION 1..9: note = Description of sequence: I23RB319
  REGION 1..9: note = Description of type of peptide: LCDR3
QQSYSTPLT

SEQ ID NO: 1206 - protein, 8 aa, Homo sapiens
  REGION 1..8: note = Description of sequence: I23RB320
  REGION 1..8: note = Description of type of peptide: HCDR1
GGTFSSYG

SEQ ID NO: 1207 - protein, 8 aa, Homo sapiens
  REGION 1..8: note = Description of sequence: I23RB320
  REGION 1..8: note = Description of type of peptide: HCDR2
ISAIFGTT

SEQ ID NO: 1208 - protein, 11 aa, Homo sapiens
  REGION 1..11: note = Description of sequence: I23RB320
  REGION 1..11: note = Description of type of peptide: HCDR3
ARNGTGNSFDY

SEQ ID NO: 1209 - protein, 6 aa, Homo sapiens
  REGION 1..6: note = Description of sequence: I23RB320
  REGION 1..6: note = Description of type of peptide: LCDR1
QSITSD

SEQ ID NO: 1210 - skipped

SEQ ID NO: 1211 - protein, 9 aa, Homo sapiens
  REGION 1..9: note = Description of sequence: I23RB320
  REGION 1..9: note = Description of type of peptide: LCDR3
QQSYSTPLT

SEQ ID NO: 1212 - protein, 8 aa, Homo sapiens
  REGION 1..8: note = Description of sequence: I23RB321
  REGION 1..8: note = Description of type of peptide: HCDR1
GGTFSSYG

SEQ ID NO: 1213 - protein, 8 aa, Homo sapiens
  REGION 1..8: note = Description of sequence: I23RB321
  REGION 1..8: note = Description of type of peptide: HCDR2
ISAIFGTT

SEQ ID NO: 1214 - protein, 10 aa, Homo sapiens
  REGION 1..10: note = Description of sequence: I23RB321
  REGION 1..10: note = Description of type of peptide: HCDR3
ARHWLQSFDY

SEQ ID NO: 1215 - protein, 6 aa, Homo sapiens
  REGION 1..6: note = Description of sequence: I23RB321
  REGION 1..6: note = Description of type of peptide: LCDR1
QSIGGD

SEQ ID NO: 1216 - skipped

SEQ ID NO: 1217 - protein, 9 aa, Homo sapiens
  REGION 1..9: note = Description of sequence: I23RB321
  REGION 1..9: note = Description of type of peptide: LCDR3
QQSYSTPLT

SEQ ID NO: 1218 - protein, 8 aa, Homo sapiens
  REGION 1..8: note = Description of sequence: I23RB328
  REGION 1..8: note = Description of type of peptide: HCDR1
GGTFSSYA

SEQ ID NO: 1219 - protein, 8 aa, Homo sapiens
  REGION 1..8: note = Description of sequence: I23RB328
  REGION 1..8: note = Description of type of peptide: HCDR2
IIPIFGTA

SEQ ID NO: 1220 - protein, 14 aa, Homo sapiens
  REGION 1..14: note = Description of sequence: I23RB328
  REGION 1..14: note = Description of type of peptide: HCDR3
ARGRYIRSYDYFDY

SEQ ID NO: 1221 - protein, 6 aa, Homo sapiens
  REGION 1..6: note = Description of sequence: I23RB328
  REGION 1..6: note = Description of type of peptide: LCDR1
QSVSSY

SEQ ID NO: 1222 - skipped

SEQ ID NO: 1223 - protein, 9 aa, Homo sapiens
  REGION 1..9: note = Description of sequence: I23RB328
  REGION 1..9: note = Description of type of peptide: LCDR3
QQRNSTPLT

SEQ ID NO: 1224 - protein, 8 aa, Homo sapiens
  REGION 1..8: note = Description of sequence: I23RB329
  REGION 1..8: note = Description of type of peptide: HCDR1
GGTFSSYA

SEQ ID NO: 1225 - protein, 8 aa, Homo sapiens
  REGION 1..8: note = Description of sequence: I23RB329
  REGION 1..8: note = Description of type of peptide: HCDR2
IIPIFGTA

SEQ ID NO: 1226 - protein, 16 aa, Homo sapiens
  REGION 1..16: note = Description of sequence: I23RB329
  REGION 1..16: note = Description of type of peptide: HCDR3
ARDSYYSTVTYYYFDY

SEQ ID NO: 1227 - protein, 6 aa, Homo sapiens
  REGION 1..6: note = Description of sequence: I23RB329
  REGION 1..6: note = Description of type of peptide: LCDR1
QSVSSY

SEQ ID NO: 1228 - skipped

SEQ ID NO: 1229 - protein, 9 aa, Homo sapiens
  REGION 1..9: note = Description of sequence: I23RB329
  REGION 1..9: note = Description of type of peptide: LCDR3
QQRSNTPLT

SEQ ID NO: 1230 - protein, 8 aa, Homo sapiens
  REGION 1..8: note = Description of sequence: I23RB330
  REGION 1..8: note = Description of type of peptide: HCDR1
GGTFSSYA

SEQ ID NO: 1231 - protein, 8 aa, Homo sapiens
  REGION 1..8: note = Description of sequence: I23RB330
  REGION 1..8: note = Description of type of peptide: HCDR2
IIPIFGTA

SEQ ID NO: 1232 - protein, 20 aa, Homo sapiens
  REGION 1..20: note = Description of sequence: I23RB330
  REGION 1..20: note = Description of type of peptide: HCDR3
ARDRSYSYGLSGLGYYGFDY

SEQ ID NO: 1233 - protein, 6 aa, Homo sapiens
  REGION 1..6: note = Description of sequence: I23RB330
  REGION 1..6: note = Description of type of peptide: LCDR1
QSVSSY

SEQ ID NO: 1234 - skipped

SEQ ID NO: 1235 - protein, 9 aa, Homo sapiens
  REGION 1..9: note = Description of sequence: I23RB330
  REGION 1..9: note = Description of type of peptide: LCDR3
QQRSNTPLT

SEQ ID NO: 1236 - protein, 8 aa, Mus musculus
  REGION 1..8: note = Description of sequence: I23RB332
  REGION 1..8: note = Description of type of peptide: HCDR1
GYTFTSYW

SEQ ID NO: 1237 - protein, 8 aa, Mus musculus
  REGION 1..8: note = Description of sequence: I23RB332
  REGION 1..8: note = Description of type of peptide: HCDR2
IDPSDSYT

SEQ ID NO: 1238 - protein, 8 aa, Mus musculus
  REGION 1..8: note = Description of sequence: I23RB332
  REGION 1..8: note = Description of type of peptide: HCDR3
ARSYAFDY

SEQ ID NO: 1239 - protein, 10 aa, Mus musculus
  REGION 1..10: note = Description of sequence: I23RB332
  REGION 1..10: note = Description of type of peptide: LCDR1
QSVDYDGDSY

SEQ ID NO: 1240 - skipped

SEQ ID NO: 1241 - protein, 9 aa, Mus musculus
  REGION 1..9: note = Description of sequence: I23RB332
  REGION 1..9: note = Description of type of peptide: LCDR3
QQSNEDPWT

SEQ ID NO: 1242 - protein, 214 aa, synthetic construct; identical to SEQ ID NO: 673
  REGION 1..214: note = Description of sequence: Light Chainand Consensus
  REGION 1..214: note = Description of type of peptide: Light Chainand Consensus

SEQ ID NO: 1243 - protein, 214 aa, synthetic construct; identical to SEQ ID NO: 681
  REGION 1..214: note = Description of sequence: Light Chainand Consensus
  REGION 1..214: note = Description of type of peptide: Light Chainand Consensus

SEQ ID NO: 1244 - protein, 220 aa, synthetic construct; identical to SEQ ID NO: 683
  REGION 1..220: note = Description of sequence: Light Chainand Consensus
  REGION 1..220: note = Description of type of peptide: Light Chainand Consensus

SEQ ID NO: 1245 - protein, 214 aa, synthetic construct; identical to SEQ ID NO: 693
  REGION 1..214: note = Description of sequence: Light Chainand Consensus
  REGION 1..214: note = Description of type of peptide: Light Chainand Consensus

SEQ ID NO: 1246 - protein, 215 aa, synthetic construct; identical to SEQ ID NO: 709
  REGION 1..215: note = Description of sequence: Light Chainand Consensus
  REGION 1..215: note = Description of type of peptide: Light Chainand Consensus

SEQ ID NO: 1247 - protein, 107 aa, synthetic construct; identical to SEQ ID NO: 787
  REGION 1..107: note = Description of sequence: Lightchain variable region and Consensus
  REGION 1..107: note = Description of type of peptide: Lightchain variable region and Consensus

SEQ ID NO: 1248 - protein, 107 aa, synthetic construct [sequence omitted]

SEQ ID NO: 1249 - protein, 113 aa, synthetic construct; identical to SEQ ID NO: 797
  REGION 1..113: note = Description of sequence: Lightchain variable region and Consensus
  REGION 1..113: note = Description of type of peptide: Lightchain variable region and Consensus

SEQ ID NO: 1250 - protein, 107 aa, synthetic construct; identical to SEQ ID NO: 807
  REGION 1..107: note = Description of sequence: Lightchain variable region and Consensus
  REGION 1..107: note = Description of type of peptide: Lightchain variable region and Consensus

SEQ ID NO: 1251 - protein, 108 aa, synthetic construct; identical to SEQ ID NO: 823
  REGION 1..108: note = Description of sequence: Lightchain variable region and Consensus
  REGION 1..108: note = Description of type of peptide: Lightchain variable region and Consensus

SEQ ID NO: 1252 - protein, 6 aa, synthetic construct
  REGION 1..6: note = Description of sequence: CDR Consensus
  REGION 1..6: note = Description of type of peptide: CDR1
QSVSSY

SEQ ID NO: 1253 - skipped

SEQ ID NO: 1254 - protein, 9 aa, synthetic construct
  REGION 1..9: note = Description of sequence: CDR Consensus
  REGION 1..9: note = Description of type of peptide: CDR3
QQRSNWPLT

SEQ ID NO: 1255 - protein, 6 aa, synthetic construct
  REGION 1..6: note = Description of sequence: CDR Consensus
  REGION 1..6: note = Description of type of peptide: CDR1
QSISSY

SEQ ID NO: 1256 - skipped

SEQ ID NO: 1257 - protein, 9 aa, synthetic construct
  REGION 1..9: note = Description of sequence: CDR Consensus
  REGION 1..9: note = Description of type of peptide: CDR3
QQSYSTPLT

SEQ ID NO: 1258 - protein, 12 aa, synthetic construct
  REGION 1..12: note = Description of sequence: CDR Consensus
  REGION 1..12: note = Description of type of peptide: CDR1
QSVLYSSNNKNY

SEQ ID NO: 1259 - skipped

SEQ ID NO: 1260 - protein, 9 aa, synthetic construct
  REGION 1..9: note = Description of sequence: CDR Consensus
  REGION 1..9: note = Description of type of peptide: CDR3
QQYYSTPLT

SEQ ID NO: 1261 - protein, 6 aa, synthetic construct
  REGION 1..6: note = Description of sequence: CDR Consensus
  REGION 1..6: note = Description of type of peptide: CDR1
QSISND

SEQ ID NO: 1262 - skipped

SEQ ID NO: 1263 - protein, 9 aa, synthetic construct
  REGION 1..9: note = Description of sequence: CDR Consensus
  REGION 1..9: note = Description of type of peptide: CDR3
QQSYSTPLT

SEQ ID NO: 1264 - protein, 7 aa, synthetic construct
  REGION 1..7: note = Description of sequence: CDR Consensus
  REGION 1..7: note = Description of type of peptide: CDR1
QSVSSSY

SEQ ID NO: 1265 - skipped

SEQ ID NO: 1266 - protein, 9 aa, synthetic construct
  REGION 1..9: note = Description of sequence: CDR Consensus
  REGION 1..9: note = Description of type of peptide: CDR3
QQYGSSPLT

SEQ ID NO: 1267 - protein, 331 aa, Rattus norvegicus
  REGION 1..331: note = Description of sequence: Rat IL-23R ECD sequence
  REGION 1..331: note = Description of type of peptide: IL-23R extracellular domain sequences
GIATINCSGNMWVEPGEIFQMGMNVSVYCQEALKNCRPRNLHFYKNGFKERFHITRINRTTARVWYKGFSEPHASMYCTAECPGRFQETLICGKDISSGYPPDAPSNMTCVIYEYSGNMTCTWNTGKPTYIDTKYTVHVKSLETEEQQQYLASNYVNISTDSLQGGRKYLVWVQAVNALGMENSQQLQVHLDDIVIPSPSIISRAETTNANVPKTIIYWKSKIMTGKVFCEMRYKATTNQTWNVKEFDTNYTYVQQSEFYLEPNSKYVFQVRCQGTGKRNWQPWSSPFVHQTPQTASQVTSKPPHEPQKIEMLTATIFKGHSTSDNSQDIG
